(19) United States
(12) Patent Application Publication
(10) Pub. No.: US 2023/0265192 A1
(43) Pub. Date: Aug. 24, 2023

(54) ANTI-CTLA-4 BINDING PROTEINS AND METHODS OF USE THEREOF

(71) Applicant: GigaGen, Inc., San Carlos, CA (US)

(72) Inventors: David Scott JOHNSON, San Francisco, CA (US); Adam Shultz ADLER, Belmont, CA (US); Rena Aviva MIZRAHI, Pacifica, CA (US); Yoong Wearn LIM, San Carlos, CA (US); Michael ASENSIO, San Carlos, CA (US); Erica Lyn STONE, San Carlos, CA (US)

(73) Assignee: GigaGen, Inc., San Carlos, CA (US)

(21) Appl. No.: 18/003,076

(22) PCT Filed: Jul. 2, 2021
(86) PCT No.: PCT/US2021/040379

§ 371 Date: Dec. 22, 2022

Related U.S. Application Data
(60) Provisional application No. 63/047,785, filed on Jul. 2, 2020.
(60) Provisional application No. 63/107,376, filed on Oct. 29, 2020.

(51) Int. Cl. C07K 16/28; A61P 35/00

(52) U.S. Cl. CPC C07K 16/2818; A61P 35/00; C07K 2317/565; C07K 2317/92; C07K 2317/41; C07K 2317/52

(57) ABSTRACT

Provided herein are antigen-binding proteins (ABPs) that selectively bind to CTLA-4 and its isoforms and homologs, and compositions comprising the ABPs. Also provided are methods of using the ABPs, such as therapeutic and diagnostic methods.

### 1. CROSS REFERENCE TO RELATED APPLICATIONS

[0001] This application claims priority benefit to U.S. provisional application Ser. No. 63/047,785 filed on Jul. 2, 2020, and 63/107,376 filed Oct. 29, 2020, which applications are incorporated herein by reference in their entireties.

### 2. SEQUENCE LISTING

[0002] The instant application contains a Sequence Listing with 12088 sequences which has been submitted via EFS-Web and is hereby incorporated by reference in its entirety. Said ASCII copy, created on Jul. 2, 2021, is named “49228WO Sequence_Listing”, and is 1.86 megabytes in size.

### 3. FIELD

[0003] Provided herein are antigen-binding proteins (ABPs) with binding specificity for CTLA-4 and compositions comprising such ABPs, including pharmaceutical compositions, diagnostic compositions, and kits. Also provided are methods of making CTLA-4 ABPs, and methods of using CTLA-4 ABPs, for example, for therapeutic purposes, diagnostic purposes, and research purposes.

### 4. BACKGROUND

[0004] CTLA-4, also known as cytotoxic T-lymphocyte associated protein 4 and CD152 (cluster of differentiation 152), is a cell surface receptor that suppresses T cell inflammatory activity. CTLA-4 is constitutively expressed by regulatory T cells (Tregs) and upregulated in stimulated T cells. CD80 and CD86, also expressed in antigen presenting cells (APCs) such as dendritic cells (DCs), are the primary ligands of CTLA-4. The interaction between CTLA-4 and its ligands is vitally important for downregulating the immune responses and promoting self-tolerance by suppressing T cell inflammatory activity. This activity prevents autoimmune diseases, as well as prevents the immune system from killing cancer cells.

[0005] CTLA-4 is a member of the immunoglobulin superfamily that is expressed by activated T cells and transmits an inhibitory signal to T cells. CTLA-4 binds CD80 and CD86 with greater affinity and avidity than CD28 thus enabling it to outcompete CD28 for its ligands. CTLA-4 transmits an inhibitory signal to T cells, whereas CD28 transmits a stimulatory signal. CTLA-4 is also found in regulatory T cells (Tregs) and contributes to their inhibitory function. T cell activation through the T cell receptor and CD28 leads to increased expression of CTLA-4. The mechanism by which CTLA-4 acts in T cells remains somewhat controversial. Biochemical evidence suggested that CTLA-4 recruits a phosphatase to the T cell receptor (TCR), thus attenuating the signal. This work remains unconfirmed in the literature since its first publication. More recent work has suggested that CTLA-4 may function in vivo by capturing and removing B7-1 and B7-2 from the membranes of antigen-presenting cells, thus making these unavailable for triggering of CD28.

[0006] Variants in CTLA-4 have been associated with insulin-dependent diabetes mellitus, Graves' disease, Hashimoto's thyroiditis, celiac disease, systemic lupus erythematosus, thyroid-associated orbitopathy, primary biliary cirrhosis and other autoimmune diseases. The comparatively high binding affinity of CTLA-4 for CD80 and CD86 has made it a potential therapy for autoimmune diseases. Soluble fusion proteins of CTLA-4 and antibodies (CTLA-4-Ig) have been used in clinical trials for rheumatoid arthritis.

[0007] Recently, CTLA-4 antibodies have been used with varying success to treat some types of cancer. CTLA-4 inhibitors have been shown to antagonize binding of CTLA-4 to its ligands, thereby activating the immune system to attack tumors. The current mechanism of action of known anti-CTLA-4 therapies is to block the interaction between CTLA-4 and its ligands for checkpoint inhibition. For example, CTLA-4 monoclonal antibodies (mAbs) such as ipilimumab were originally intended to block the binding of CTLA-4 to its ligands, the B7 proteins CD80 and CD86, i.e., “checkpoint inhibition”. Blocking CTLA-4 binding to B7 proteins frees B7 proteins to bind to CD28, inducing T cell co-stimulation and activation. CTLA-4 antibodies have also been used to induce antibody-dependent cell-mediated cytotoxicity (ADCC) of Tregs specific to the tumor microenvironment, thus reducing immune tolerance to the tumor. Thus, in addition to blocking the interaction of CTLA-4 with its B7 ligands, anti-CTLA-4 mAbs are also able to induce antibody-dependent cell-mediated cytotoxicity (ADCC) and antibody-dependent cellular phagocytosis (ADCP) of intratumoral FOXP3⁺ regulatory T cells (Tregs), which express comparatively high levels of surface CTLA-4.

[0008] Thus, inhibition of CTLA-4 function is currently one of the most promising systemic therapeutic approach for various diseases. There is a need for developing CTLA-4 ABPs that can be used for treatment, diagnosis, and research of various diseases, including cancer and autoimmune disease.

[0009] PCT Application PCT/US2019/068820, filed on Dec. 27, 2019 and published as Publication No. WO2020140084A1, describes CTLA-4 ABPs, which application is incorporated by reference in its entirety herein.

### 5. SUMMARY

[0010] Provided herein are novel ABPs with binding specificity for CTLA-4 and methods of using such ABPs. The ABPs specifically bind a human CTLA-4 (SEQ ID: 7001) or a fragment of the human CTLA-4.

[0011] In particular, in one aspect, the present disclosure provides a novel CTLA-4 monoclonal antibody with minimal ability to block CTLA-4 binding to its CD80/CD86 ligands but has superior anti-tumor activity with reduced toxicity. The anti-CTLA4 antibody was demonstrated to induce less peripheral Treg proliferation, and more efficient intratumoral Treg depletion, in murine models expressing human CTLA-4.

[0012] The present disclosure also provides that the anti-CTLA-4 monoclonal antibodies bind to CTLA-4 at an epitope that differs from other, known anti-CTLA-4 antibodies (e.g., Ipilimumab), and has limited checkpoint inhibitor activity and thus is a weak checkpoint inhibitor. Surprisingly, efficacy of the anti-CTLA-4 antibodies presented herein was found to be associated with FcR-mediated Treg depletion in the tumor microenvironment. The anti-CTLA-4 antibodies also induce less Treg proliferation and has increased ability to induce in vitro FcR signaling and in vivo depletion of intratumoral Tregs. Experimental results described herein suggest that the enhanced FcR activity of the weak checkpoint inhibitor likely contributes to its enhanced anti-tumor activity. They also show that weak checkpoint inhibition was associated with lower toxicity in murine models.

[0013] In some embodiments, when bound to CTLA-4, the ABP contacts amino acids K130, Y139, L141, I143 but does not contact amino acid R70 of the CTLA-4, or R70 is not energetically a major contributor to the interaction between CTLA-4 and the ABP; and/or the CTLA-4 can associate with CD80/CD86 when bound to the ABP; and/or an interaction between the ABP and amino acid L74A and/or E68 of the CTLA-4 is greater than an interaction between Ipilimumab and amino acid L74A of CTLA-4.

[0014] In some embodiments, the ABP comprises a CDR1-L consisting of SEQ ID NO:12078 or SEQ ID NO: 1014, a CDR2-L consisting of SEQ ID NO:12079 or SEQ ID NO: 2014, a CDR3-L consisting of SEQ ID NO:12080 or SEQ ID NO: 3014, a CDR1-H consisting of SEQ ID NO:12075 or SEQ ID NO: 4014, a CDR2-H consisting of SEQ ID NO:12076 or SEQ ID NO: 5014 and a CDR3-H consisting of SEQ ID NO:12077 or SEQ ID NO: 6014. In some embodiments, the ABP comprises a CDR1-L consisting of SEQ ID NO: 12004, a CDR2-L consisting of SEQ ID NO: 12014, a CDR3-L consisting of SEQ ID NO: 12024, a CDR1-H consisting of SEQ ID NO: 12039, a CDR2-H consisting of SEQ ID NO: 12049, and a CDR3-H consisting of SEQ ID NO: 12059. In some embodiments, the ABP comprises a CDR1-L consisting of SEQ ID NO: 12005, a CDR2-L consisting of SEQ ID NO: 12015, a CDR3-L consisting of SEQ ID NO: 12025, a CDR1-H consisting of SEQ ID NO: 12040, a CDR2-H consisting of SEQ ID NO: 12050, and a CDR3-H consisting of SEQ ID NO: 12060. In some embodiments, the ABP comprises a CDR1-L consisting of SEQ ID NO: 12006, a CDR2-L consisting of SEQ ID NO: 12016, a CDR3-L consisting of SEQ ID NO: 12026, a CDR1-H consisting of SEQ ID NO: 12041, a CDR2-H consisting of SEQ ID NO: 12051, and a CDR3-H consisting of SEQ ID NO: 12061. In some embodiments, the ABP comprises a CDR1-L consisting of SEQ ID NO: 12007, a CDR2-L consisting of SEQ ID NO: 12017, a CDR3-L consisting of SEQ ID NO: 12027, a CDR1-H consisting of SEQ ID NO: 12042, a CDR2-H consisting of SEQ ID NO: 12052, and a CDR3-H consisting of SEQ ID NO: 12062. In some embodiments, the ABP comprises a CDR1-L consisting of SEQ ID NO: 12008, a CDR2-L consisting of SEQ ID NO: 12018, a CDR3-L consisting of SEQ ID NO: 12028, a CDR1-H consisting of SEQ ID NO: 12043, a CDR2-H consisting of SEQ ID NO: 12053, and a CDR3-H consisting of SEQ ID NO: 12063.

[0015] In some embodiments, the ABP comprises a variable light chain (V_{L}) comprising a sequence at least 97% identical to SEQ ID NO:14 and a variable heavy chain (V_{H}) comprising a sequence at least 97% identical to SEQ ID NO:114.

[0016] In some embodiments, the ABP comprises an scFv or a full length monoclonal antibody. In some embodiments, the ABP comprises an immunoglobulin constant region.

[0017] In some embodiments, the ABP binds human CTLA-4 with a K_{D} of less than 500 nM, as measured by surface plasmon resonance; or the ABP binds human CTLA-4 with a K_{D} of less than 200 nM, as measured by surface plasmon resonance; or the ABP binds human CTLA-4 with a K_{D} of less than 25 nM, as measured by surface plasmon resonance; or the ABP binds to human CTLA-4 on a cell surface with a K_{D} of less than 25 nM.

[0018] In some embodiments, the ABP is a IgG1 ABP. In some embodiments, the ABP comprises an IGHG1*01 human heavy chain constant region gene segment. In some embodiments, the ABP comprises a lysine at amino acid position 97 (R97) according to IMGT exon numbering. In some embodiments, the ABP comprises a lysine at amino acid position 97 (R214) according to EU numbering.

[0019] In some embodiments, the ABP comprises an afucosylated Fc region.

[0020] In some embodiments, the ABP is produced from a cell comprising a bacterial protein RMD (GDP-6-deoxy-D-lyxo-4-hexulose reductase) or a modification thereof. In some embodiments, the cell is cultured in the absence of fucose.

[0021] In some embodiments, the ABP is produced from a cell lacking or reduced expression of Fut8. In some embodiments, the ABP is produced from a cell cultured in the presence of a fucosylation inhibitor, 2-Fluorfucose (2FF). In some embodiments, the ABP is produced from a cell overexpressing glycosyltransferase (GnTIII). In some embodiments, the ABP has been isolated based on its fucosylation status.

[0022] In some embodiments, the ABP comprises an Fc region lacking core fucosylation of the N-glycan of the Fc portion. In some embodiments, the ABP is an afucosylated monoclonal antibody.

[0023] Aspects of the present disclosure also include a pharmaceutical composition comprising the ABP of the present disclosure and a pharmaceutically acceptable excipient.

[0024] In some embodiments, less than 50% of the ABP is fucosylated. In some embodiments, less than 40% of the ABP is fucosylated. In some embodiments, less than 30% of the ABP is fucosylated. In some embodiments, less than 20% of the ABP is fucosylated. In some embodiments, less than 10% of the ABP is fucosylated. In some embodiments, more than 30% of the ABP is fucosylated. In some embodiments, more than 40% of the ABP is fucosylated. In some embodiments, more than 50% of the ABP is fucosylated. In some embodiments, more than 60% of the ABP is fucosylated. In some embodiments, more than 70% of the ABP is fucosylated. In some embodiments, more than 80% of the ABP is fucosylated. In some embodiments, more than 90% of the ABP is fucosylated.

[0025] In some embodiments, the pharmaceutical composition has a pH from 5.0 to 6.5. In some embodiments, the pharmaceutical composition comprises 20 mM of histidine or citrate buffer. In some embodiments, the pharmaceutical composition comprises 50 mM of NaCl. In some embodiments, the pharmaceutical composition comprises sucrose at a concentration from 170 mM to 270 mM. In some embodiments, the pharmaceutical composition comprises 170 mM or 270 mM of sucrose. In some embodiments, the pharmaceutical composition comprises 5 mg/mL to 20 mg/mL of the ABP. In some embodiments, the pharmaceutical composition comprises 20 mg/mL of the ABP. In some embodiments, the pharmaceutical composition comprises 5 mg/mL of the ABP.

[0026] Aspects of the present disclosure provide a method of treating a disease comprising the step of: administering to a subject in need thereof an effective amount of the ABP of any of the ABPs of the present disclosure or the pharmaceutical composition thereof.

[0027] In some embodiments, the disease is selected from the group consisting of cancer, AIDS, Alzheimer's disease and viral or bacterial infection.

[0028] In some embodiments, further comprising the step of administering one or more additional therapeutic agents to the subject. In some embodiments, additional therapeutic agent is selected from an anti-PD-L1, an anti-PD1, a LAG-3 inhibitor, aCD47 inhibitor, a TIGIT inhibitor, a chemotherapy agent, an immune-stimulatory agent, radiation, a BRAF inhibitor, a MEK inhibitor, a PI3K inhibitor, a cytokine, a polynucleotide encoding a cytokine, an oncolytic virus encoding a cytokine, and a combination thereof.

[0029] Aspects of the present disclosure include an isolated polynucleotide encoding the ABP. Aspects of the present disclosure include a vector comprising the isolated polynucleotide. Aspects of the present disclosure provide a host cell comprising the isolated polynucleotide or the vector of the present disclosure. In some embodiments, the host cell further comprises a bacterial protein RMD (GDP-6-deoxy-D-lyxo-4-hexulose reductase). In some embodiments, the host cell is cultured in the absence of fucose. In some embodiments, the host cell is lacking or having reduced expression of Fut8. In some embodiments, the host cell is cultured in the presence of a fucosylation inhibitor 2-Fluorfucose (2FF). In some embodiments, the host cell is overexpressing glycosyltransferase (GnTIII).

[0030] Aspects of the present disclosure provide a method of producing an isolated antigen binding protein (ABP) that specifically binds human CTLA-4, comprising inducing expression of the ABP in the host cell of the present disclosure, and isolating the ABP.

[0031] In some embodiments, further comprising the step of isolating the ABP based on its fucosylation status. In some embodiments, the host cell is cultured in a cultured medium comprising a fucosylation inhibitor. In some embodiments, the fucosylation inhibitor is 2-Fluorfucose (2FF).

[0032] A method of reducing CTLA-4^{HI} Tregs in a subject with limited proliferation of remaining Tregs comprising administering an effective dose of the ABP or the pharmaceutical composition described in the present disclosure.

[0033] In some embodiments, the subject is a human subject, optionally, a human subject with RCC (renal cell cancer), NSCLC (non-small cell lung cancer), Merkel cell carcinoma, cSCC, mesothelioma, MSI colorectal cancer, ovarian cancer, or cervical cancer.

[0034] In some embodiments, further comprising the step of administering one or more additional therapeutic agents to the subject. In some embodiments, the additional therapeutic agent is an anti-PD-L1 or an anti-PD1 or a combination thereof.

[0035] In another aspect, the present disclosure provides an isolated antigen binding protein (ABP) that specifically binds a human cytotoxic T-lymphocyte associated protein 4 (CTLA-4), wherein the ABP comprises: (a) a CDR1-L consisting of SEQ ID NO:12078, a CDR2-L consisting of SEQ ID NO: 12079, a CDR3-L consisting of SEQ ID NO:12080, a CDR1-H consisting of SEQ ID NO:12075, a CDR2-H consisting of SEQ ID NO:12076 and a CDR3-H consisting of SEQ ID NO:12077; (b) a CDR1-L consisting of SEQ ID NO: 1014, a CDR2-L consisting of SEQ ID NO: 2014, a CDR3-L consisting of SEQ ID NO: 3014, a CDR1-H consisting of SEQ ID NO: 4014, a CDR2-H consisting of SEQ ID NO: 5014 and a CDR3-H consisting of SEQ ID NO: 6014; (c) a CDR1-L consisting of SEQ ID NO: 12004, a CDR2-L consisting of SEQ ID NO: 12014, a CDR3-L consisting of SEQ ID NO: 12024, a CDR1-H consisting of SEQ ID NO: 12039, a CDR2-H consisting of SEQ ID NO: 12049, and a CDR3-H consisting of SEQ ID NO: 12059; (d) a CDR1-L consisting of SEQ ID NO: 12005, a CDR2-L consisting of SEQ ID NO: 12015, a CDR3-L consisting of SEQ ID NO: 12025, a CDR1-H consisting of SEQ ID NO: 12040, a CDR2-H consisting of SEQ ID NO: 12050, and a CDR3-H consisting of SEQ ID NO: 12060; (e) a CDR1-L consisting of SEQ ID NO: 12006, a CDR2-L consisting of SEQ ID NO: 12016, a CDR3-L consisting of SEQ ID NO: 12026, a CDR1-H consisting of SEQ ID NO: 12041, a CDR2-H consisting of SEQ ID NO: 12051, and a CDR3-H consisting of SEQ ID NO: 12061; (f) a CDR1-L consisting of SEQ ID NO: 12007, a CDR2-L consisting of SEQ ID NO: 12017, a CDR3-L consisting of SEQ ID NO: 12027, a CDR1-H consisting of SEQ ID NO: 12042, a CDR2-H consisting of SEQ ID NO: 12052, and a CDR3-H consisting of SEQ ID NO: 12062; or (g) a CDR1-L consisting of SEQ ID NO: 12008, a CDR2-L consisting of SEQ ID NO: 12018, a CDR3-L consisting of SEQ ID NO: 12028, a CDR1-H consisting of SEQ ID NO: 12043, a CDR2-H consisting of SEQ ID NO: 12053, and a CDR3-H consisting of SEQ ID NO: 12063.

[0036] In some embodiments, the ABP comprises a variable light chain (V_{L}) comprising a sequence at least 97% identical to SEQ ID NO:14 and a variable heavy chain (V_{H}) comprising a sequence at least 97% identical to SEQ ID NO: 114.

[0037] In some embodiments, the ABP comprises an scFv or a full length monoclonal antibody. In some embodiments, the ABP comprises an immunoglobulin constant region.

[0038] In some embodiments, the ABP binds human CTLA-4 with a K_{D} of less than 500 nM, as measured by surface plasmon resonance; or the ABP binds human CTLA-4 with a K_{D} of less than 200 nM, as measured by surface plasmon resonance; or the ABP binds human CTLA-4 with a K_{D} of less than 25 nM, as measured by surface plasmon resonance; or the ABP binds to human CTLA-4 on a cell surface with a K_{D} of less than 25 nM.

[0039] In some embodiments, the ABP is a IgG1 ABP. In some embodiments, the ABP comprises an IGHG1*01 human heavy chain constant region gene segment. In some embodiments, the ABP comprises a lysine at amino acid position 97 (R97) according to IMGT exon numbering. In some embodiments, the ABP comprises a lysine at amino acid position 97 (R214) according to EU numbering.

[0040] In some embodiments, the ABP comprises an afucosylated Fc region.

[0041] In some embodiments, the ABP is produced from a cell comprising a bacterial protein RMD (GDP-6-deoxy-D-lyxo-4-hexulose reductase) or a modification thereof. In some embodiments, the cell is cultured in the absence of fucose. In some embodiments, the ABP is produced from a cell lacking or reduced expression of Fut8. In some embodiments, the ABP is produced from a cell cultured in the presence of a fucosylation inhibitor, 2-Fluorfucose (2FF). In some embodiments, the ABP is produced from a cell overexpressing glycosyltransferase (GnTIII). In some embodiments, the ABP has been isolated based on its fucosylation status.

[0042] In some embodiments, the ABP comprising an Fc region lacking core fucosylation of the N-glycan of the Fc portion. In some embodiments, the ABP is an afucosylated monoclonal antibody. In some embodiments, the afucosylated Fc region has less than 30% fucosylation, and wherein less than 30% fucosylation enhances FcgRIII (Fc Gamma Receptor III) signaling. In some embodiments, the afucosylated Fc region has less than 30% fucosylation, and wherein less than 30% fucosylation enhances FcgRIIIa (Fc Gamma Receptor IIIa) signaling. In some embodiments, the afucosylated Fc region has less than 30% fucosylation, and wherein less than 30% fucosylation enhances a protein encoded by protein encoded by FcgR3a.

[0043] Aspects of the present disclosure include a pharmaceutical composition comprising the ABP of the present disclosure, and a pharmaceutically acceptable excipient.

[0044] In some embodiments, less than 50% of the ABP is fucosylated. In some embodiments, less than 40% of the ABP is fucosylated. In some embodiments, less than 30% of the ABP is fucosylated. In some embodiments, less than 20% of the ABP is fucosylated. In some embodiments, less than 10% of the ABP is fucosylated. In some embodiments, more than 30% of the ABP is fucosylated. In some embodiments, more than 40% of the ABP is fucosylated. In some embodiments, more than 50% of the ABP is fucosylated. In some embodiments, more than 60% of the ABP is fucosylated. In some embodiments, more than 70% of the ABP is fucosylated. In some embodiments, more than 80% of the ABP is fucosylated. In some embodiments, more than 90% of the ABP is fucosylated.

[0045] In some embodiments, the pharmaceutical composition has a pH from 5.0 to 6.5. In some embodiments, the pharmaceutical composition comprises 20 mM of histidine or citrate buffer. In some embodiments, the pharmaceutical composition comprises 50 mM of NaCl. In some embodiments, the pharmaceutical composition comprises sucrose at a concentration from 170 mM to 270 mM. In some embodiments, the pharmaceutical composition comprises 170 mM or 270 mM of sucrose. In some embodiments, the pharmaceutical composition comprises 5 mg/mL to 20 mg/mL of the ABP. In some embodiments, the pharmaceutical composition comprises 20 mg/mL of the ABP. In some embodiments, the pharmaceutical composition comprises 5 mg/mL of the ABP.

[0046] Aspects of the present disclosure provide a method of treating a disease comprising the step of: administering to a subject in need thereof an effective amount of the ABP of any of the ABPs of the present disclosure or the pharmaceutical composition thereof.

[0047] In some embodiments, the disease is selected from the group consisting of cancer, AIDS, Alzheimer's disease and viral or bacterial infection.

[0048] In some embodiments, further comprising the step of administering one or more additional therapeutic agents to the subject. In some embodiments, additional therapeutic agent is selected from an anti-PD-L1, an anti-PD1, a LAG-3 inhibitor, aCD47 inhibitor, a TIGIT inhibitor, a chemotherapy agent, an immune-stimulatory agent, radiation, a BRAF inhibitor, a MEK inhibitor, a PI3K inhibitor, a cytokine, a polynucleotide encoding a cytokine, an oncolytic virus encoding a cytokine, and a combination thereof.

[0049] Aspects of the present disclosure include an isolated polynucleotide encoding the ABP. Aspects of the present disclosure include a vector comprising the isolated polynucleotide. Aspects of the present disclosure provide a host cell comprising the isolated polynucleotide or the vector of the present disclosure. In some embodiments, the host cell further comprises a bacterial protein RMD (GDP-6-deoxy-D-lyxo-4-hexulose reductase). In some embodiments, the host cell is cultured in the absence of fucose. In some embodiments, the host cell is lacking or having reduced expression of Fut8. In some embodiments, the host cell is cultured in the presence of a fucosylation inhibitor 2-Fluorfucose (2FF). In some embodiments, the host cell is overexpressing glycosyltransferase (GnTIII).

[0050] Aspects of the present disclosure provide a method of treating cancer comprising the step of administering to a subject in need thereof an effective amount of the ABP or the pharmaceutical composition of the present disclosure. In some embodiments, the subject has a malignant tumor. In some embodiments, when administered, comprises increased Fc receptor (FcR) signaling as compared to ipilimumab, and wherein said administering reduces the amount of CTLA-4^{HI} Tregs in the subject. In some embodiments, said administering reduces proliferation of peripheral Tregs in the subject as compared to ipilimumab.

[0051] In some embodiments, further comprising the step of administering one or more additional therapeutic agents to the subject. In some embodiments, the additional therapeutic agent is selected from an anti-PD-L1, an anti-PDT, a TIGIT inhibitor, a LAG-3 inhibitor, a CD47 inhibitor, a BRAF inhibitor, a MEK inhibitor, a PI3K inhibitor, a chemotherapy agent, an immune-stimulatory agent, radiation, a cytokine, a polynucleotide encoding a cytokine, an oncolytic virus encoding a cytokine, and a combination thereof.

[0052] In some embodiments, the ABP comprises an afucosylated Fc region that has less than 30% fucosylation, and wherein less than 30% fucosylation enhances FcgRIII signaling. In some embodiments, the ABP comprises an afucosylated Fc region that has less than 30% fucosylation, and wherein less than 30% fucosylation enhances FcgRIIIa signaling. In some embodiments, the ABP comprises a fucosylated Fc region that has more than 70% fucosylation. In some embodiments, the afucosylated Fc region has less than 30% fucosylation, and wherein less than 30% fucosylation enhances a protein encoded by protein encoded by FcgR3a.

[0053] Aspects of the present disclosure include an isolated polynucleotide encoding the ABP. Aspects of the present disclosure include a vector comprising the isolated polynucleotide. Aspects of the present disclosure provide a host cell comprising the isolated polynucleotide or the vector of the present disclosure. In some embodiments, the host cell further comprises a bacterial protein RMD (GDP-6-deoxy-D-lyxo-4-hexulose reductase). In some embodiments, the host cell is cultured in the absence of fucose. In some embodiments, the host cell is lacking or having reduced expression of Fut8. In some embodiments, the host cell is cultured in the presence of a fucosylation inhibitor 2-Fluorfucose (2FF). In some embodiments, the host cell is overexpressing glycosyltransferase (GnTIII).

[0054] Aspects of the present disclosure provide a method of producing an isolated antigen binding protein (ABP) that specifically binds human CTLA-4, comprising inducing expression of the ABP in the host cell of the present disclosure, and isolating the ABP, wherein the ABP comprises an afucosylated Fc.

[0055] In some embodiments, further comprising the step of isolating the ABP based on its fucosylation status. In some embodiments, the host cell is cultured in a cultured medium comprising a fucosylation inhibitor. In some embodiments, the fucosylation inhibitor is 2-Fluorfucose (2FF).

[0056] In another aspect, the present disclosure provides an isolated antigen binding protein (ABP) that specifically binds a human cytotoxic T-lymphocyte associated protein 4 (CTLA-4), comprising an IGHG1*01 human heavy chain constant region gene segment.

[0057] In some embodiments, the ABP comprises: (a) a CDR1-L consisting of SEQ ID NO:12078, a CDR2-L consisting of SEQ ID NO: 12079, a CDR3-L consisting of SEQ ID NO:12080, a CDR1-H consisting of SEQ ID NO:12075, a CDR2-H consisting of SEQ ID NO:12076 and a CDR3-H consisting of SEQ ID NO: 12077; (b) a CDR1-L consisting of SEQ ID NO: 1014, a CDR2-L consisting of SEQ ID NO: 2014, a CDR3-L consisting of SEQ ID NO: 3014, a CDR1-H consisting of SEQ ID NO: 4014, a CDR2-H consisting of SEQ ID NO: 5014 and a CDR3-H consisting of SEQ ID NO: 6014; (c) a CDR1-L consisting of SEQ ID NO: 12004, a CDR2-L consisting of SEQ ID NO: 12014, a CDR3-L consisting of SEQ ID NO: 12024, a CDR1-H consisting of SEQ ID NO: 12039, a CDR2-H consisting of SEQ ID NO: 12049, and a CDR3-H consisting of SEQ ID NO: 12059; (d) a CDR1-L consisting of SEQ ID NO: 12005, a CDR2-L consisting of SEQ ID NO: 12015, a CDR3-L consisting of SEQ ID NO: 12025, a CDR1-H consisting of SEQ ID NO: 12040, a CDR2-H consisting of SEQ ID NO: 12050, and a CDR3-H consisting of SEQ ID NO: 12060; (e) a CDR1-L consisting of SEQ ID NO: 12006, a CDR2-L consisting of SEQ ID NO: 12016, a CDR3-L consisting of SEQ ID NO: 12026, a CDR1-H consisting of SEQ ID NO: 12041, a CDR2-H consisting of SEQ ID NO: 12051, and a CDR3-H consisting of SEQ ID NO: 12061; (f) a CDR1-L consisting of SEQ ID NO: 12007, a CDR2-L consisting of SEQ ID NO: 12017, a CDR3-L consisting of SEQ ID NO: 12027, a CDR1-H consisting of SEQ ID NO: 12042, a CDR2-H consisting of SEQ ID NO: 12052, and a CDR3-H consisting of SEQ ID NO: 12062; or (g) a CDR1-L consisting of SEQ ID NO: 12008, a CDR2-L consisting of SEQ ID NO: 12018, a CDR3-L consisting of SEQ ID NO: 12028, a CDR1-H consisting of SEQ ID NO: 12043, a CDR2-H consisting of SEQ ID NO: 12053, and a CDR3-H consisting of SEQ ID NO: 12063. In some embodiments, the ABP comprises a variable light chain (V_{L}) comprising a sequence at least 97% identical to SEQ ID NO:14 and a variable heavy chain (V_{H}) comprising a sequence at least 97% identical to SEQ ID NO:114.

[0058] In some embodiments, the ABP comprises: (a) a CDR1-L consisting of any one of SEQ ID NOs:, a CDR2-L consisting of any one of SEQ ID NOs: 1001-1028, a CDR3-L consisting of any one of SEQ ID NOs: 2001-2028, a CDR1-H consisting of any one of SEQ ID NOs:, a CDR2-H consisting of consisting of any one of SEQ ID NOs: 3001-3028. In some embodiments, the ABP comprises a variable light chain (V_{L}) comprising a sequence at least 97% identical to any one of SEQ ID NOs:1-28 and a variable heavy chain (V_{H}) comprising a sequence at least 97% identical to SEQ ID NO:1-128.

[0059] In some embodiments, the ABP comprises a lysine at amino acid position 97 (R97) according to IMGT exon numbering. In some embodiments, the ABP comprises a lysine at amino acid position 97 (R214) according to EU numbering. In some embodiments, comprising an afucosylated Fc region. In some embodiments, produced from a cell comprising a bacterial protein RMD (GDP-6-deoxy-D-lyxo-4-hexulose reductase) or a modification thereof. In some embodiments, the cell is cultured in the absence of fucose. In some embodiments, produced from a cell lacking or reduced expression of Fut8. In some embodiments, produced from a cell cultured in the presence of a fucosylation inhibitor, 2-Fluorfucose (2FF). In some embodiments, produced from a cell overexpressing glycosyltransferase (GnTIII). In some embodiments, having been isolated based on its fucosylation status. In some embodiments, comprising an Fc region lacking core fucosylation of the N-glycan of the Fc portion. In some embodiments, the ABP is an afucosylated monoclonal antibody.

[0060] Aspects of the present disclosure include a pharmaceutical composition comprising the ABP of the present disclosure, and a pharmaceutically acceptable excipient.

[0061] In some embodiments, less than 50% of the ABP is fucosylated. In some embodiments, less than 40% of the ABP is fucosylated. In some embodiments, less than 30% of the ABP is fucosylated. In some embodiments, less than 20% of the ABP is fucosylated. In some embodiments, less than 10% of the ABP is fucosylated. In some embodiments, more than 30% of the ABP is fucosylated. In some embodiments, more than 40% of the ABP is fucosylated. In some embodiments, more than 50% of the ABP is fucosylated. In some embodiments, more than 60% of the ABP is fucosylated. In some embodiments, more than 70% of the ABP is fucosylated. In some embodiments, more than 80% of the ABP is fucosylated. In some embodiments, more than 90% of the ABP is fucosylated.

[0062] In some embodiments, the pharmaceutical composition has a pH from 5.0 to 6.5. In some embodiments, the pharmaceutical composition comprises 20 mM of histidine or citrate buffer. In some embodiments, the pharmaceutical composition comprises 50 mM of NaCl. In some embodiments, the pharmaceutical composition comprises sucrose at a concentration from 170 mM to 270 mM. In some embodiments, the pharmaceutical composition comprises 170 mM or 270 mM of sucrose. In some embodiments, the pharmaceutical composition comprises 5 mg/mL to 20 mg/mL of the ABP. In some embodiments, the pharmaceutical composition comprises 20 mg/mL of the ABP. In some embodiments, the pharmaceutical composition comprises 5 mg/mL of the ABP.

[0063] Aspects of the present disclosure provide a method of treating a disease comprising the step of administering to a subject in need thereof an effective amount of the ABP or the pharmaceutical composition.

[0064] In some embodiments, the disease is selected from the group consisting of cancer, AIDS, Alzheimer's disease and viral or bacterial infection.

[0065] In some embodiments, further comprising the step of administering one or more additional therapeutic agents to the subject. In some embodiments, the additional therapeutic agent is selected from an anti-PD-L1, an anti-PD1, a TIGIT inhibitor, a LAG-3 inhibitor, a CD47 inhibitor, a BRAF inhibitor, a MEK inhibitor, a PI3K inhibitor, a chemotherapy agent, an immune-stimulatory agent, radiation, a cytokine, a polynucleotide encoding a cytokine, an oncolytic virus encoding a cytokine, and a combination thereof.

[0066] Aspects of the present disclosure include an isolated polynucleotide encoding the ABP. Aspects of the present disclosure include a vector comprising the isolated polynucleotide. Aspects of the present disclosure provide a host cell comprising the isolated polynucleotide or the vector of the present disclosure. In some embodiments, the host cell further comprises a bacterial protein RMD (GDP-6-deoxy-D-lyxo-4-hexulose reductase). In some embodiments, the host cell is cultured in the absence of fucose. In some embodiments, the host cell is lacking or having reduced expression of Fut8. In some embodiments, the host cell is cultured in the presence of a fucosylation inhibitor 2-Fluorfucose (2FF). In some embodiments, the host cell is overexpressing glycosyltransferase (GnTIII).

[0067] Aspects of the present disclosure provide a method of producing an isolated antigen binding protein (ABP) that specifically binds human CTLA-4, comprising inducing expression of the ABP in the host cell, and isolating the ABP.

[0068] In some embodiments, further comprising the step of isolating the ABP based on its fucosylation status. In some embodiments, the host cell is cultured in a cultured medium comprising a fucosylation inhibitor. In some embodiments, the fucosylation inhibitor is 2-Fluorfucose (2FF).

[0069] Aspects of the present disclosure provide a method of reducing CTLA-4^{HI} Tregs in a subject with limited proliferation of remaining Tregs comprising administering an effective dose of the ABP or the pharmaceutical composition.

[0070] In some embodiments, the subject is a human subject, optionally, a human subject with melanoma, RCC (renal cell cancer), NSCLC (non-small cell lung cancer), Merkel cell carcinoma, cSCC, mesothelioma, MSI colorectal cancer, ovarian cancer, or cervical cancer. In some embodiments, further comprising the step of administering one or more additional therapeutic agents to the subject. In some embodiments, the additional therapeutic agent is an anti-PD-L1 or an anti-PD1 or a combination thereof. In some embodiments, the subject has a tumor with high levels of Tregs, high levels of CTLA-4, high levels of NK cells, or high levels of activating FcRs.

[0071] In another aspect, the present disclosure provides an isolated antigen binding protein (ABP) that specifically binds to an antigen, comprising an IGHG1*01 human heavy chain constant region gene segment.

[0072] In some embodiments, the ABP comprises a lysine at amino acid position 97 (R97) according to IMGT exon numbering. In some embodiments, the ABP comprises a lysine at amino acid position 97 (R214) according to EU numbering.

[0073] In some embodiments, comprising an afucosylated Fc region. In some embodiments, produced from a cell comprising a bacterial protein RMD (GDP-6-deoxy-D-lyxo-4-hexulose reductase) or a modification thereof. In some embodiments, the cell is cultured in the absence of fucose. In some embodiments, produced from a cell lacking or reduced expression of Fut8. In some embodiments, produced from a cell cultured in the presence of a fucosylation inhibitor, 2-Fluorfucose (2FF).

[0074] In some embodiments, produced from a cell overexpressing glycosyltransferase (GnTIII). In some embodiments, having been isolated based on its fucosylation status. In some embodiments, comprising an Fc region lacking core fucosylation of the N-glycan of the Fc portion. In some embodiments, the ABP is an afucosylated monoclonal antibody.

[0075] In some embodiments, the ABP is selected from an anti-CTLA-4 antibody or antigen-binding fragment thereof, anti-PD-L1 antibody or antigen-binding fragment thereof, an anti-PD1 antibody or antigen-binding fragment thereof, a TIGIT antibody or antigen-binding fragment thereof, a LAG-3 antibody or antigen-binding fragment thereof, a CD47 antibody or antigen-binding fragment thereof, a BRAF antibody or antigen-binding fragment thereof, a MEK antibody or antigen-binding fragment thereof, and a PI3K antibody or antigen-binding fragment thereof.

[0076] In some embodiments, the ABP comprises: (a) a CDR1-L consisting of SEQ ID NO:12078, a CDR2-L consisting of SEQ ID NO: 12079, a CDR3-L consisting of SEQ ID NO:12080, a CDR1-H consisting of SEQ ID NO:12075, a CDR2-H consisting of SEQ ID NO:12076 and a CDR3-H consisting of SEQ ID NO: 12077; (b) a CDR1-L consisting of SEQ ID NO: 1014, a CDR2-L consisting of SEQ ID NO: 2014, a CDR3-L consisting of SEQ ID NO: 3014, a CDR1-H consisting of SEQ ID NO: 4014, a CDR2-H consisting of SEQ ID NO: 5014 and a CDR3-H consisting of SEQ ID NO: 6014; (c) a CDR1-L consisting of SEQ ID NO: 12004, a CDR2-L consisting of SEQ ID NO: 12014, a CDR3-L consisting of SEQ ID NO: 12024, a CDR1-H consisting of SEQ ID NO: 12039, a CDR2-H consisting of SEQ ID NO: 12049, and a CDR3-H consisting of SEQ ID NO: 12059; (d) a CDR1-L consisting of SEQ ID NO: 12005, a CDR2-L consisting of SEQ ID NO: 12015, a CDR3-L consisting of SEQ ID NO: 12025, a CDR1-H consisting of SEQ ID NO: 12040, a CDR2-H consisting of SEQ ID NO: 12050, and a CDR3-H consisting of SEQ ID NO: 12060; (e) a CDR1-L consisting of SEQ ID NO: 12006, a CDR2-L consisting of SEQ ID NO: 12016, a CDR3-L consisting of SEQ ID NO: 12026, a CDR1-H consisting of SEQ ID NO: 12041, a CDR2-H consisting of SEQ ID NO: 12051, and a CDR3-H consisting of SEQ ID NO: 12061; (f) a CDR1-L consisting of SEQ ID NO: 12007, a CDR2-L consisting of SEQ ID NO: 12017, a CDR3-L consisting of SEQ ID NO: 12027, a CDR1-H consisting of SEQ ID NO: 12042, a CDR2-H consisting of SEQ ID NO: 12052, and a CDR3-H consisting of SEQ ID NO: 12062; or (g) a CDR1-L consisting of SEQ ID NO: 12008, a CDR2-L consisting of SEQ ID NO: 12018, a CDR3-L consisting of SEQ ID NO: 12028, a CDR1-H consisting of SEQ ID NO: 12043, a CDR2-H consisting of SEQ ID NO: 12053, and a CDR3-H consisting of SEQ ID NO: 12063.

[0077] In some embodiments, the ABP comprises a variable light chain (V_{L}) comprising a sequence at least 97% identical to SEQ ID NO:14 and a variable heavy chain (V_{H}) comprising a sequence at least 97% identical to SEQ ID NO:114.

[0078] In some embodiments, the ABP comprises: (a) a CDR1-L consisting of any one of SEQ ID NO: 12081:, a CDR2-L consisting of SEQ ID NO: 12082, a CDR3-L consisting of SEQ ID NO: 12083, a CDR1-H consisting of SEQ ID NO: 12084, a CDR2-H consisting of consisting of SEQ ID NO: 12085, and a CDR3-H consisting of SEQ ID NO: 12086.

[0079] In some embodiments, the ABP comprises a variable light chain (V_{L}) comprising a sequence at least 97% identical to SEQ ID NO: 12088 and a variable heavy chain (V_{H}) comprising a sequence at least 97% identical to SEQ ID NO: 12087.

[0080] In some embodiments, the pharmaceutical composition has a pH from 5.0 to 6.5. In some embodiments, the pharmaceutical composition comprises 20 mM of histidine or citrate buffer. In some embodiments, the pharmaceutical composition comprises 50 mM of NaCl. In some embodiments, the pharmaceutical composition comprises sucrose at a concentration from 170 mM to 270 mM. In some embodiments, the pharmaceutical composition comprises 170 mM or 270 mM of sucrose. In some embodiments, the pharmaceutical composition comprises 5 mg/mL to 20 mg/mL of the ABP. In some embodiments, the pharmaceutical composition comprises 20 mg/mL of the ABP. In some embodiments, the pharmaceutical composition comprises 5 mg/mL of the ABP.

[0081] Aspects of the present disclosure include a method of treating a disease comprising the step of: administering to a subject in need thereof an effective amount of the ABP or the pharmaceutical composition.

[0082] In some embodiments, the disease is selected from the group consisting of cancer, AIDS, Alzheimer's disease and viral or bacterial infection. In some embodiments, further comprising the step of administering one or more additional therapeutic agents to the subject.

[0083] In some embodiments, the additional therapeutic agent is selected from a chemotherapy agent, an immune-stimulatory agent, radiation, a cytokine, a polynucleotide encoding a cytokine, an oncolytic virus encoding a cytokine, and a combination thereof.

[0084] Aspects of the present disclosure include an isolated polynucleotide encoding the ABP. Aspects of the present disclosure include a vector comprising the isolated polynucleotide. Aspects of the present disclosure provide a host cell comprising the isolated polynucleotide or the vector of the present disclosure. In some embodiments, the host cell further comprises a bacterial protein RMD (GDP-6-deoxy-D-lyxo-4-hexulose reductase). In some embodiments, the host cell is cultured in the absence of fucose. In some embodiments, the host cell is lacking or having reduced expression of Fut8. In some embodiments, the host cell is cultured in the presence of a fucosylation inhibitor 2-Fluorfucose (2FF). In some embodiments, the host cell is overexpressing glycosyltransferase (GnTIII).

[0085] Aspects of the present disclosure provide a method of producing an isolated antigen binding protein (ABP) that specifically binds human CTLA-4, comprising inducing expression of the ABP in the host cell, and isolating the ABP.

[0086] In some embodiments, further comprising the step of isolating the ABP based on its fucosylation status. In some embodiments, the host cell is cultured in a cultured medium comprising a fucosylation inhibitor. In some embodiments, the fucosylation inhibitor is 2-Fluorfucose (2FF).

[0087] Aspects of the present disclosure provide a method of reducing CTLA-4^{HI} Tregs in a subject with limited proliferation of remaining Tregs comprising administering an effective dose of the ABP or the pharmaceutical composition.

[0088] In some embodiments, the subject is a human subject, optionally, a human subject with melanoma, RCC (renal cell cancer), NSCLC (non-small cell lung cancer), Merkel cell carcinoma, cSCC, mesothelioma, MSI colorectal cancer, ovarian cancer, or cervical cancer.

[0089] In some embodiments, further comprising the step of administering one or more additional therapeutic agents to the subject. In some embodiments, the subject has a tumor with high levels of Tregs, high levels of CTLA-4, high levels of NK cells, or high levels of activating FcRs.

[0090] Aspects of the present disclosure provide a method of reducing CTLA-4^{HI} Tregs in a subject with limited proliferation of remaining Tregs comprising administering to the subject an effective dose of an antigen binding protein (ABP) that specifically binds a human cytotoxic T-lymphocyte associated protein 4 (CTLA-4).

[0091] In some embodiments, the subject is a human subject, optionally, a human subject with melanoma, RCC (renal cell cancer), NSCLC (non-small cell lung cancer), Merkel cell carcinoma, cSCC, mesothelioma, MSI colorectal cancer, ovarian cancer, or cervical cancer.

[0092] In some embodiments, further comprising the step of administering one or more additional therapeutic agents to the subject.

[0093] In some embodiments, the ABP comprises a variable light chain (V_{L}) comprising a sequence at least 97% identical to SEQ ID NO:14 and a variable heavy chain (V_{H}) comprising a sequence at least 97% identical to SEQ ID NO:114.

[0094] In some embodiments, the ABP comprises: (a) a CDR1-L consisting of any one of SEQ ID NOs:, a CDR2-L consisting of any one of SEQ ID NOs: 1001-1028, a CDR3-L consisting of any one of SEQ ID NOs: 3001-3028, a CDR1-H consisting of any one of SEQ ID NOs:, a CDR2-H consisting of consisting of any one of SEQ ID NOs: 3001-3028.

[0095] In some embodiments, the ABP comprises a variable light chain (V_{L}) comprising a sequence at least 97% identical to any one of SEQ ID NOs:1-28 and a variable heavy chain (V_{H}) comprising a sequence at least 97% identical to SEQ ID NO: 101-128.

### 6. BRIEF DESCRIPTION OF THE DRAWINGS

[0096] FIG. 1 summarizes the method of generating scFv libraries from B cells isolated from fully human mice and selecting for a yeast expressing an scFv having affinity to the antigen derived from a B cell expressing an antibody having affinity to the antigen. FIG. 1 discloses SEQ ID NOS 11971-11998, respectively, in order of appearance.

[0097] FIG. 2 illustrates scFv amplification procedure. First, a mixture of primers directed against the IgK C region, the IgG C region, and all V regions is used to separately amplify IgK and IgH. Second, the V-H and C-K primers contain a region of complementarity that results in the formation of an overlap extension amplicon that is a fusion product between IgK and IgH. The region of complementarity comprises a DNA sequence that encodes a Gly-Ser rich scFv linker sequence. Third, semi-nested PCR is performed to add adapters for Illumina sequencing or yeast display.

[0098] FIG. 3 includes a schematic for the monoclonal antibodies sorted in their epitope bins.

[0099] FIG. 4A-4E include plots from the histopathological staining of hCTLA-4 KI mice bearing MC38 tumors treated with PBS or an anti-CTLA-1 ABP. The plots show scoring of H&E (FIG. 4A), immunoglobulin (Ig) (FIG. 4B and FIG. 4C), and C3 stains (FIG. 4D and FIG. 4E) from the right kidney. ipi is Ipilimumab, and CTLA4. A14.2a is antibody A14 cloned onto a mouse IgG2a backbone.

[0100] FIG. 5 includes a plot showing the alkaline phosphatase levels in treated hCTLA4 KI mice bearing MC38 tumors. IPI is Ipilimumab, and CTLA4. A14.2a is antibody A14 cloned onto a mouse IgG2a backbone. U/L is units per liter.

[0101] FIG. 6 includes plots for the percentages of intratumoral regulatory T cells (Treg) cells and intratumoral natural killer (NK) cells after the indicated treatments.

[0102] FIG. 7 includes a plot showing the changes in body weight of the hCTLA4 mice receiving the indicated treatments. Ipi is Ipilimumab, and CTLA4. A14.2a is antibody A14 cloned onto a mouse IgG2a backbone. Error bars represent+/−standard error of the mean.

[0103] FIG. 8A-8F include plots showing the influence of the control, Ipi and the anti-CTLA4 treatments on percentage of the indicated cell populations, including CD3+ cells (FIG. 8A), CD4+ cells (FIG. 8B), CD69+ cells (FIG. 8C), ICOS+ cells (FIG. 8D), PD1+ cells (FIG. 8E), and FOXP3+ cells (FIG. 8F). Ipi is Ipilimumab, and CTLA4. A14.2a is antibody A14 cloned onto a mouse IgG2a backbone.

[0104] FIG. 9A-9D include plots showing the influence of the control, Ipi and the anti-CTLA4 treatments on percentage of the indicated cell populations, including CD8+ cells (FIG. 9A), CD69+ cells (FIG. 9B), ICOS+ cells (FIG. 9C) and PD1+ cells (FIG. 9D). Ipi is Ipilimumab, and CTLA4. A14.2a is antibody A14 cloned onto a mouse IgG2a backbone.

[0105] FIG. 10 includes plots showing the influence of the control, Ipi and the anti-CTLA4 treatments on percentage of dendritic cells (DCs) and activated dendritic cells (CD86+). Ipi is Ipilimumab, and CTLA4. A14.2a is antibody A14 cloned onto a mouse IgG2a backbone.

[0106] FIG. 11 includes a plot showing the mean tumor volume after treatment with 0.3 mg/kg of the indicated anti-CTLA4s.

[0107] FIG. 12A-12B shows that FcR effector function is required for the anti-tumor efficacy of ipilimumab in a murine model. FIG. 12A. The plot shows the frequency of CD4+FOXP3− T cells from the LN of individual control (C57BL/6) or hCTLA4-KI mice that are CD44LoCD62L+ as determined by flow cytometry (mean+/−SEM). FIG. 12B. hCTLA-4 KI mice bearing MC38 tumors were randomized when tumors were 50-151 mm3 (day 0) and treated bi-weekly with the indicated antibody at 5 mg/kg for 5 doses. The plot shows the tumor volume (mean+SEM) of MC38 tumors over time that were treated with the indicated antibody. Tumor volume from mice euthanized due to tumor burden above 3000 mm³ was carried forward. Thin vertical lines indicate censored data: Thin gray vertical lines indicate animals likely lost post dosing due to anti-drug antibody (ADA)-induced hypersensitivity, thin black vertical lines refer to animals euthanized due to tumor burden and for which the data was carried forward. Ipi analog indicates an ipilimumab mAb produced and purified by Applicant; N297Q indicates that the antibody contains an N297Q mutation in the Fc domain of the antibody to abrogate Fc effector function. n=8 for isotype, aCTLA-4.28, Ipi-N297Q; n=7 for ipi analog and aCTLA-4.28. p=0.0004 when comparing Ipi analog to isotype and p=0.0006 when comparing aCTLA-4.28 to isotype for change in tumor volume between groups (linear mixed effects model).

[0108] FIG. 13A-13D show that GIGA-564 has little ability to block the interaction of CTLA-4 and CD80/CD86 in vitro. FIG. 13A. The ability of CTLA-4 mAbs to block binding of CD80 or CD86 was measured using a plate-based ELISA method. CTLA-4 was used to coat the plate, then after the antibody samples were incubated, His-tagged CD80 or CD86 was added, and the amount of ligand able to bind to CTLA-4 was measured. Blocking mAbs that prevent CD80 or CD86 from binding to CTLA-4 reduce the absorbance signal due to lack of CD80 or CD86 binding to CTLA-4. Weak-blocking mAbs still allow CD80 or CD86 to bind, preventing the loss of all absorbance signal. FIG. 13B. Plots show the ability of GIGA-564 to block the interaction between CTLA-4 and the B7 ligands CD80 and CD86 compared to ipilimumab and CTLA-4.28, as assessed by ELISA as described in (FIG. 13A). Absorbance values were normalized to an anti-PD-1 control (pembrolizumab) and displayed as the average of two technical replicates. FIG. 13C-13D. The key residues mediating CTLA-4 binding were identified for GIGA-564 and ipilimumab by shotgun mutagenesis of CTLA-4, followed by staining and flow cytometry assessment of binding. FIG. 13C. Shown is the crystal structure (Protein Database [PDB] 1I8L) of the complex between CD80 (blue) and CTLA-4 (gray) on which the CTLA-4 epitope residues shared between ipilimumab and GIGA-564 were colored orange and the key differentiating residue R70 was colored red (visualized with Pymol). Additionally, G142 was identified as a secondary residue for the epitope of ipilimumab but not GIGA-564. FIG. 13D. Table showing key amino acids on CTLA-4 of interest for these epitopes; those found by mutational analysis to be important for binding of CTLA-4 to CD80 or CD86 in a cell-based assay are marked in gray to indicate the epitope residues for those proteins.

[0109] FIG. 14A-14C show that GIGA-564 inhibits tumor growth in murine models. FIG. 14A. hCTLA-4 KI mice bearing MC38 tumors were randomized when tumors were 50-150 mm³ (day 0) and treated bi-weekly with the indicated antibody at 5 mg/kg for 5 doses. Plots show the tumor volume (mean+SEM) of MC38 tumors over time that were treated with the indicated antibody. Tumor volume from mice euthanized due to tumor burden above 3000 mm³ was carried forward. Thin gray vertical lines indicate censored data (animals likely lost post dosing due to ADA-induced hypersensitivity). This experiment is also described in FIG. 12B. n=7 for GIGA-564 and n=6 for vehicle and commercial ipilimumab. FIG. 14B. hCTLA-4 KI mice bearing RM-1 tumors were randomized when tumors were 40-125 mm³ (day 0) and treated on day 0, 3, and 6 with 5 mg/kg of the indicated antibody. Plots show the tumor volume (mean±SEM) of RM-1 tumors over time that were treated with the indicated antibody. Tumor volume from mice euthanized due to tumor burden above 3000 mm³ was carried forward until no mice from that group were alive (thin black vertical lines). Thin vertical lines indicate censored data. The thin gray vertical line indicates one mouse from the ipilimumab treated group was euthanized due to tumor ulceration. n=11 for ipilimumab and GIGA-564 treatment and n=7 for isotype treatment. FIG. 14C (as is also shown in FIG. 11). hCTLA-4 KI mice bearing MC38 tumors were randomized when tumors were 65-125 mm³ (day 0) and treated on days 0, 3, and 6 with 0.3 mg/kg of the indicated antibody. Plots show the tumor volume (mean±SEM) of MC38 tumors over time that were treated with the indicated antibody. Tumor volume from mice euthanized due to tumor burden above 3000 mm³ was carried forward until no mice from that group remained alive (thin black vertical lines). n=13 for ipilimumab and GIGA-564 and n=8 for isotype treated animals. P-values are shown for statistically significant differences in changes in tumor volume measured longitudinally (linear mixed effects model).

[0110] FIG. 15A-15E shows that GIGA-564 induces less peripheral Treg proliferation but potently mediates depletion of intratumoral Tregs. FIG. 15A. hCTLA-4 KI mice (n=12) were treated with 5 mg/kg hIgG1 isotype control, ipilimumab, or GIGA-564 on days 0, 3, and 6, and euthanized for flow cytometry analysis on day 7. Two samples in the GIGA-564 group were excluded from analysis due to low cell count. The percent of CD8 T cells (Live, CD45⁺TCRβ⁺CD8⁺), CD4 Tconv (Live, CD45⁺TCRβ⁺CD4⁺FOXP3⁻), and Tregs (Live, CD45⁺TCRβ⁺CD4⁺FOXP3⁺) within the non-draining (left anterior axillary) lymph node (LN) expressing Ki67 was determined by flow cytometry (first 3 panels). The right panel shows the fold-change in the percent of cells of each subtype expressing Ki67 in ipilimumab or GIGA-564 treated mice relative to the mean frequency of that cell type expressing in the isotype control treated group. In this right panel, p-values were calculated using the Mann-Whitney (Wilcoxon) test without adjustment for multiple pairwise comparison. Fewer proliferating Tregs may further enhance efficacy as compared to ipilimumab in patients. FIG. 15B-15E. hCTLA-4 KI mice bearing established MC38 tumors were randomized (n=6) and treated once with 5 mg/kg hIgG1 isotype control, ipilimumab, or GIGA-564 and cells from the non-draining LN and tumor were analyzed the following day by flow cytometry. FIG. 15B. Frequency of Tregs (as percentage of CD45⁺ cells) in LN (left) and tumor (right) in each treatment group. FIG. 15C. CTLA-4 geometric mean fluorescence intensity (MFI) in Tregs in LN (left) and tumor (right). FIG. 15D. Representative contour plots of CD4 T cells in each treatment group. X-axis and Y-axis correspond to FOXP3 and CTLA-4, respectively. FIG. 15E. Ratio of CD8 T cells relative to Tregs in LN (left) and tumor (right). Unless otherwise indicated, p-values were calculated using Wilcoxon rank sum test and horizontal lines indicate means. Flow cytometry showed that GIGA-564 is more efficient than ipilimumab at depleting CTLA-4⁺ Tregs in the tumor microenvironment. Data from FIG. 15D is reshown in FIG. 32.

[0111] FIGS. 16A-16D shows that GIGA-564 induces more FcR signaling than ipilimumab. FIGS. 16A-16D. Target CHO cells expressing human CTLA-4 with the Y201G mutation to enhance surface expression were incubated with a titration series of ipilimumab (black squares), GIGA-564 (black stars), or a variant of GIGA-564 with LALA-PG mutations to disrupt FcγR binding (GIGA-564_LALA-PG, gray circles). Jurkat/NFAT-Luc effector cells with (FIG. 16A) mouse FcγRIV or FcγRIII, (FIG. 16B) human FcγRIIIa (high-affinity V158 or low-affinity F158 variant), (FIG. 16C) human FcγRIIa (high-affinity H131 or low-affinity R131 variant), or (FIG. 16D) human FcγRIIb were then added. Cells were incubated for 6 hours at 37° C. then luciferase activity was measured. Data shown are relative luminescence units (RLU) emitting from the effectors cells and are plotted as the average of two technical replicates.

[0112] FIGS. 17A-17B shows GIGA-564 provides protection in a murine tumor re-challenge model. FIG. 17A. hCTLA-4 KI mice bearing MC38 tumors were randomized when tumors were 60-120 mm³ (day 8) and then treated every 3 days for 3 doses with the indicated antibody at 1 mg/kg. Plots show the tumor volume (mean±SEM) of MC38 tumors over time that were treated with the indicated antibody. Tumor volume from mice euthanized due to tumor burden above 3000 mm³ was carried forward (thin vertical black lines). n=8 for isotype and commercial ipilimumab, n=9 for GIGA-564. FIG. 17B. MC38 cells were implanted on the opposite flank of naïve C57BL/6 mice and mice from (FIG. 17A) that were previously treated with ipilimumab or GIGA-564 and had a durable complete response on day 43 (0 mm³ tumor volume). Plots show the tumor volume (mean SEM) of MC38 tumors over time that were previously treated with the indicated antibody or naïve mice (n=5). Tumor volume (in mm³) was analyzed using a linear mixed effects model including treatment group and day as fixed effects and animal identifier (ID) as a random effect to account for repeated measures. Statistical comparisons were made using the Wald test against the isotype control group in the initial challenge model and against the naïve control group in the re-challenge model. Compared to the naïve group, previous treatment with ipilimumab (p=0.0089) or GIGA-564 (p=0.0088) limited tumor growth.

[0113] FIGS. 18A-18C shows that GIGA-564 plus pembrolizumab induces less toxicity than ipilimumab plus pembrolizumab in a murine model. hCTLA-4/hPD-1 double KI mice on the BALB/c background between 4-5 weeks of age were treated with vehicle, pembrolizumab, pembrolizumab plus ipilimumab (Ipi), or pembrolizumab plus GIGA-564 every 3 days for 9 doses. One week after the last dose mice were euthanized and tissues collected for pathology analysis. FIG. 18A. Plot shows percent change in body weight over time in mice treated with the indicated therapy (mean±SEM, n=10). Four mice from the pembrolizumab plus ipilimumab group died on day 12 and from the pembrolizumab plus GIGA-564 treated group three mice died on day 12 and one mouse died on day 15, all likely due to post dosing ADA-induced hypersensitivity. A mixed effect model found no statistical differences in the percent body weight change between groups. FIGS. 18B-18C. Plots show skin inflammation (FIG. 18B) or colonic epithelial damage (colitis; FIG. 18C) scores (mean+/−SEM) induced by each treatment regimen. Horizontal lines indicate the median. Adjusted p-values were calculated using the Benjamini-Hochberg step-down procedure to account for multiple comparisons.

[0114] FIG. 19 shows a Model depicting ipilimumab and GIGA-564 mechanisms of action. Top panel: Ipilimumab blocks CTLA-4 interaction with CD80/CD86, which allows antigen presenting cells (APCs) to co-stimulate peripheral Tregs enhancing their proliferation. GIGA-564 weakly blocks CTLA-4 interaction with CD80/CD86 and thus induces less Treg proliferation. Bottom panel: Ipilimumab and GIGA-564 bind CTLA-4 on intratumoral Tregs to induce Treg killing via interactions with Fc receptor (FcR) on effector cells. GIGA-564 induces stronger FcR signaling and thus more efficiently depletes intratumoral Tregs than ipilimumab.

[0115] FIGS. 20A-20E shows in vitro characterization of scFvs reformatted as full-length antibodies. FIG. 20A. Clonal cluster analysis for the FACS-enriched anti-CTLA-4 scFv clones. Each node represents an scFv clone (full-length IgK+IgH). The total number of amino acid differences were computed between each pairwise alignment of scFv sequences. Edges indicate pairwise alignments with ≤9 amino acid differences (Clustergram modified from FIG. 7 of Asensio et al., 2019). The scFv sequence for ipilimumab (ipi) was included for comparison. scFv clones for full-length antibodies described in this study are labeled with ID numbers. FIG. 20B. The affinity of the indicated antibody to soluble CTLA-4 was determined by SPR (Carterra). Plots show association and dissociation signals with a 5-fold dilution series of antigen starting at 500 nM. FIG. 20C. A 50:50 mixture of CTLA-4⁺ and CD27⁺ (CTLA-4⁻) CHO cells were stained with 10 μg/ml of the indicated antibody. An anti-human IgG secondary antibody conjugated to PE was used to detect cells labeled with the indicated anti-CTLA-4 antibody, while anti-CD27-FITC identified CD27⁺ CHO cells. Histograms show staining of CTLA-4⁺ (CD27-FITC⁻) or CTLA-4⁻ (CD27-FITC⁺) cells by the indicated antibody as determine by flow cytometry. FIG. 20D. The cell-based CTLA-4 Blockade Bioassay (Promega) involved co-culturing CTLA-4-expressing Jurkat cells with Raji cells, which naturally express CD80 and CD86, in the presence of the indicated mAbs. mAbs that bind to CTLA-4 and block the ability of CTLA-4 to interact with CD80/CD86 lead to CD28 pathway-activated luciferase expression. Plot shows the amount of luciferase expression induced (relative luciferase units; RLU) when cells were cultured with a titration series of the indicated antibody. Due to constraints on sample size in each Promega bioassay kit, this set of aCTLA-4 mAbs was analyzed using multiple plates. To control for plate-to-plate variability in maximum signal, the ipilimumab analog was run on each plate, and a representative sample was used to calculate the EC50 and maximum signal for ipilimumab in Table 23. The plate in which each antibody was tested is indicated in Table 23. Plate A and B were run at the same time, while Plate C and Plate D were run separately at later times. E. Correlation between antibody affinity and cell-based assay activity. Antibody affinity (KD) for CTLA-4 was compared to the blocking EC50 and the RLU maximum signal; no correlation was found for either when the data was fit by linear regression. Each data point represents a single antibody, and the following antibodies are distinguished as follows: ipilimumab analog (red square), GIGA-564 (inverted triangle), and aCTLA-4.28 (star). Data is from (FIG. 20D) and Table 23.

[0116] FIG. 21 provides a validation of N297Q mutants binding to cell-surface CTLA-4. CHO cells with and without human CTLA-4 expression were incubated with 10 μg/mL of the indicated antibody, then an anti-human IgG secondary antibody conjugated to FITC was used to detect cells bound by the indicated CTLA-4 antibody. Histograms show staining of CTLA-4⁺ or CTLA-4⁻ cells by the indicated antibody as determine by flow cytometry.

[0117] FIGS. 22A-22D shows that co-stimulation enhances Treg proliferation. Histograms show CellTrace Violet signal (gated on Live, CD3⁺CD4⁺ cells) of FIG. 22A. Treg or FIG. 22B. Tconv cells cultured in the presence of M-450 Tosyl activated beads coated with anti-CD3 antibody with and without CD80, or FIG. 22C. Treg or FIG. 22D. Tconv cells activated with M-450 Tosyl activated beads coated with anti-CD3 antibody plus CD80 in the presence of rhCTLA-4 (Abatacept) and/or anti-CTLA-4 mAb (aCTLA-4.28).

[0118] FIGS. 23A-23D show anti-CTLA-4s deplete intratumoral Tregs in hCTLA-4 KI mice. Flow cytometry analysis of cells from MC38 tumor bearing hCTLA-4 KI mice receiving CTLA-4 mAbs. FIGS. 23A and 23C. 6 mice per group were treated with 5 mg/kg hIgG1 isotype control, ipilimumab, or GIGA-564 on day 0 and 3, and cells were analyzed on day 4. FIGS. 23B and 23D. 12 mice per group were treated with 5 mg/kg hIgG1 isotype control, ipilimumab, or GIGA-564 on day 0, 3, and 6, and cells were analyzed on day 7. Two lymph node samples in the GIGA-564 group were excluded from analysis due to low cell count. FIGS. 23A-23B. Frequency of Tregs (Live, CD45⁺TCRβ-CD4⁺FOXP3⁺, as percentage of CD45⁺ cells) in lymph nodes (left) and tumor (right) in each treatment group. FIGS. 23C-23D. Geometric mean fluorescence intensity (MFI) of intracellular CTLA-4 in Tregs in LN (left) and tumor (right). P-values were calculated using Wilcoxon rank sum test. Lines depict mean+/−SEM.

[0119] FIG. 24 shows GIGA-564 induces more FcR signaling than ipilimumab. FIG. 24A. Purified CTLA-4 antibodies were diluted to a starting concentration of 5 μg/mL for an 8-point, 5-fold titration series in different pH buffers, then added to wells coated with rhCTLA-4-Fc. Bound antibodies were detected with anti-constant kappa-HRP and measured for absorbance at 450 nm. FIG. 24B. CHO cells expressing wildtype hCTLA-4 incubated with titrations of ipilimumab or GIGA-564 at 37° C. to allow for internalization. The amount of antibody remaining on the surface was then determined by staining with anti-human IgG Fc. FIGS. 24C-24D. GIGA-564 from three different productions was tested for fucosylation levels (bar graphs each depict a single data point) (FIG. 24C) and human FcγRIIIA signaling (FIG. 24D). PN-2758.01 and PN-4088.01 were generated from transient transfection of ExpiCHO cells, while PN-4261.01 was from a stably-expressing pool of CHOZN clones (EP-1, enriched pool 1). FIG. 24C. The fucosylation level, as determined by UPLC analysis, is shown for each sample. FIG. 24D-24E. Graph shows human FcγRIIIA (V variant) signaling as determined in a cell-based assay for the indicated three preparations of GIGA-564 (FIG. 24D) or GIGA-564 and ipilimumab with the indicated amount of fucosylation (FIG. 24E). A negative control protein with mutations to disrupt Fc receptor binding (GIGA-564_LALAPG) was also tested in the reporter bioassays. Data shown are RLU emitting from effectors cells.

[0120] FIGS. 25A-25E shows GIGA-564 results in less toxicity than ipilimumab in murine models. FIGS. 25A-25D. hCTLA-4/hPD-1 double KI mice on the BALB/c background between 4 to 5 weeks of age were treated with vehicle, pembrolizumab, pembrolizumab plus ipilimumab, or pembrolizumab plus GIGA-564 every 3 days for 9 doses. One week after the last dose mice were euthanized and tissues collected for pathology analysis. Graphs show colon length (FIG. 25A) or spleen weight (FIG. 2511) from mice of each group at time of euthanasia. The number of CD45⁺ cells/mm² counted on randomly selected CD45 stained heart FFPE sections (FIG. 25C) or the heart pathology score (FIG. 25D) as determined by a pathologist are shown. FIG. 25E. hCTLA-4 KI mice bearing MC38 tumors were treated with vehicle (PBS) or 5 mg/kg ipilimumab or GIGA-564 twice a week for 5 doses (FIG. 14A). On day 20 post initiation of treatment, mice were euthanized and kidneys were processed into formalin fixed paraffin embedded blocks (FFPE). FFPE sections were stained for anti-mouse immunoglobin or C3 and scored by a board-certified veterinary pathologist blinded from the study. Positive staining in glomeruli was along the capillary basement membranes. Graphs show percent of glomeruli positive for anti-murine IgG or C3 and the relative intensity of positive glomeruli; at least 5 glomeruli were examined in each section on 40×/high power. Data from FIG. 25E is also shown in FIGS. 4A-4E. Lines indicate mean+/−SEM. Adjusted p-value were calculated using the Benjamini-Hochberg step-down procedure to account for multiple comparisons.

[0121] FIG. 26 shows that checkpoint inhibitor Ipilimumab increases the percentage of proliferating Tregs in mice expressing humanized CTLA-4. Data from FIG. 26 is from the same experiment as FIG. 15A.

[0122] FIG. 27 shows that intratumoral Treg depletion is the mechanism of action for anti-CTLA-4, not checkpoint inhibition. FIG. 27 (left) shows that Fc effector function in anti-CTLA-4 is necessary for robust anti-tumor responses. As shown, tumor volume decreased with ipilimumab and GIGA-577 as compared to ADCC-deficient ipilimumab and ADCC-deficient GIGA-577. Data from FIG. 27 includes data as shown in FIGS. 12B and 14A.

[0123] FIG. 28 shows that GIGA-564 anti-CTLA-4 antibody has weak checkpoint inhibitor activity, but has a strong affinity for CTLA-4. A schematic showing the conventional mechanism versus the current mechanism of action as described in the present application is compared. Depletion of Tregs in the tumor after treatment with GIGA-564 is through ADCC/ADCP binding, rather than the interaction of CTLA-4 and its ligands.

[0124] FIG. 29 shows that GIGA-564 weakly blocks CD80/CD86 binding interactions to CTLA-4 as compared to Ipilimumab. FIG. 29 may reshow data shown in FIG. 20D (plate A).

[0125] FIG. 30 shows that GIGA-564 has superior anti-tumor activity compared to Ipilimumab. Humanized CTLA-4 knock-in mice bearing MC38 tumors (n=8-13) were dosed with GIGA-564 or Ipilimumab at 0.3 mpk on days 0, 3, and 6 of the study. Following administration of GIGA-564, CTLA-4 knock-in mice having MC38 tumors showed reduced tumor volume and an increased probability of survival, as compared to Ipilimumab and the isotype. The superior efficacy of GIGA-564 confirms that weakness of GIGA-564 is its inability for checkpoint inhibition. Experiments described in FIG. 30 is also described in FIGS. 11 and 14C. Tumor growth data from FIG. 30 includes data as shown in FIGS. 11 and 14C.

[0126] FIG. 31 shows that GIGA-564 induces less Treg proliferation than Ipilimumab. Human CTLA-4 knock-in mice bearing MC38 tumors were treated with 5 mpk of ipilimumab or GIGA-564 on days 0, 3, and 6 and sacrified on Day 7. GIGA-564 treatment resulted in fewer proliferating Tregs in the periphery. Experiments described here was also described in FIG. 15A. FIG. 31 includes data previously shown in FIG. 15A.

[0127] FIG. 32 shows representative contour plots of CD4 T cells in each treatment group. X-axis and Y-axis correspond to FOXP3 and CTLA-4, respectively. FIG. 32 reshows results from FIG. 15D.

[0128] FIG. 33 shows that GIGA-564 induces more FcR signaling than Ipilimumab when co-cultured with hCTLA-4+ cells. Cellular signaling via CtLA-4-Fc-FcR interaction was assessed in vitro with human CTLA-4+ cells. GIGA-564 showed increased FcR signaling over ipilimumab. Further experiments ruled out that the difference is due to Fc-FcR affinity or CTLA-4 cells surface cycling. FIG. 33 may reshow some data from FIG. 16B.

[0129] FIG. 34 provides the development and validation of CHO cells expressing cynomolgus (cyno) CTLA-4 on the cell surface. Flow histograms show that the cyno CTLA-4 and hCTLA-4 CHO cell lines express antigen on the cell surface bound by anti-CTLA-4 clone L3D10 or BNL3, this validates expression of cyno or human CTLA-4 on the surface of these cell lines, respectively.

[0130] FIG. 35 shows that GIGA-564 has reduced ability to bind surface expressed cyno CTLA-4 compared to Ipilimumab. FIG. 35 shows flow cytometric analysis of binding of mAbs to cyno or human CTLA-4+ CHO cells. The data shows that while GIGA-564 and Ipi have relatively similar ability to bind hCTLA-4; compared to Ipi, GIGA-564 has a greatly reduced ability to bind to cyno CTLA-4 expressed on the cell surface. Data from atezo binding (negative control) is reshown on multiple plots for reference.

[0131] FIG. 36A-36E show that GIGA-564 has reduced binding to some presentations of cyno CTLA-4 compared to Ipilimumab as tested using an ELISA assay. In these ELISAs binding of GIGA-564 to various CTLA-4 proteins sourced from multiple manufacturers, including Fc chimera and his-tagged formats, was tested. To test the binding of GIGA-564 to Fc chimera CTLA-4 proteins, rcmCTLA-4-Fc from R&D systems (9336-CT-200, FIG. 36A), Sino Biological (90213-C02H, FIG. 36B), or ACROBiosystems (CT4-C5256, FIG. 36C) were coated at 1 ug/mL on one half of separate ELISA plates. Recombinant human CTLA-4-Fc (rhCTLA-4) from R&D Systems (7268-CT-100. FIGS. 36A-36C) was coated at 1 ug/mL, on the other half of each of the plates. Similarly, to test the binding of GIGA-564 to his-tagged CTLA-4, rcmCTLA-4-His from Sino Biological (90213-C08H, FIG. 36D) or ACROBiosystems (CT4-C5227, FIG. 36E) were coated at 1 ug/mL on one half of separate ELISA plates. RhCTLA-4-Fc (ACROBiosystems, CT4-H5229, FIGS. 36D-E) was coated at 1 ug/mL, on the other half of each of these plates. After coating, the plates were incubated overnight at 4° C. The following day, the plates were blocked with 5% milk in PBST for 1 hour on a plate shaker at room temperature. Titration series of Ipilimumab, Atezolizumab (negative control), and GG-564 (starting at 5 ug/mL) were added to the plates and incubated on a plate shaker for 1 hour at room temperature to allow mAb binding. Excess, unbound mAbs were removed by washing with PBST. Bound mAbs were then detected with an HRP-conjugated anti-kappa light chain antibody (0.5 ug/ml, Southern Biotech 2060-50). After incubation on a plate shaker for 1 hour at room temperature and washing, the plates were developed with TMB substrate. After sufficient signal was achieved, 1 N hydrochloric acid was added to stop development. Absorbance at 450 nm was read using a Spectramax i3x plate reader (Molecular Devices). EC50 values were calculated by plotting absorbance vs. the log of concentration using Prism (GraphPad). As Ipi has similar binding to human and cyno CTLA-4 but GIGA-564 in most cases has reduced ability to bind cyno CTLA-4 compared to human CTLA-4 the results suggest that the Ipi and GIGA-564 epitopes are different in practice.

[0132] FIG. 37 provides response plots generated to determine an optimized formulation for the GIGA-564. Response plots showed the impact of pH and sucrose concentration when NaCl and buffer concentration are fixed at 100 mM and 30 mM, respectively

[0133] FIG. 38 shows theoretical response plots generated to determine the buffer concentration and NaCl amount expected to result in the highest Tm for the formulation of GIGA-564 antibody as shown.

[0134] FIG. 39 shows a pareto analysis that provided which variables had the most impact on the formulation for GIGA-564.

[0135] FIG. 40 provides a conformational analysis of a formulation for GIGA-564. The plots show that high NaCl is the most important for conformation, pH has some effect, with lower pH being better, and sucrose has some effect, with higher being better.

[0136] FIG. 41 shows that GIGA-2328 is designed to have low fucosylation for the purpose of enhancing FcγRIIIa signaling. An ADCC reporter bioassay for human FcγRIIIa, V variant (G7011) from Promega Corporation was carried out following the manufacturer's instructions. Briefly, CHO target cells stably expressing human CTLA-4 with the Y201G mutation to enhance cell surface expression were suspended in RPMI 1640+4% FBS media with the indicated antibody and incubated at 37° C. for 30 minutes. Jurkat/NFAT-Luc effector cells expressing human FcγRIIIa, V variant were added to each well at an effector:target ratio of 5:1 and incubated at 37° C. for 6 hours. Luciferase activity was measured by using the included Bio-Glo Luciferase Assay Reagent with the SpectraMax i3x reader. Luciferase activity measured in relative luminescence units (RLU) were plotted against the concentration of antibody.

[0137] FIGS. 42A-42B shows that GIGA-564 induces antibody-dependent cellular cytotoxicity (ADCC) and/or antibody-dependent cellular phagocytosis (ADCP) by human PBMCs against a target cell line expressing CTLA-4. Cryopreserved human PBMCs from two donors were thawed and recovered overnight in RMPI media containing 100 U/mL IL-2 and 10% FBS. CHO target cells stably expressing human CTLA-4 with the Y201G mutation to enhance cell surface expression were stained with CellTrace Violet (Thermo Fisher), then incubated with either GIGA-564 or a human IgG1 isotype control at the indicated concentrations at 37° C. for 30 minutes. PMBC effector cells were then added at a 20:1 effector to target ratio and the samples were incubated at 37° C. for 4 hours to allow for ADCC. The samples were then washed with MACS buffer, stained with the viability dye 7-Aminoactinomycin D (7-AAD) to label dead cells, and analyzed by flow cytometry. (FIG. 42A) Representative gating strategy to determine ADCC. Samples were first gated for target cells (CellTrace Violet+), then single cells, then dead (7-AAD+) cells. (FIG. 42B) Plots of percent dead cells at each concentration of GIGA-564 and human IgG1 isotype. GIGA-564 leads to higher percent dead CTLA-4+ target cells than the isotype control.

[0138] FIGS. 43A-43B show that IgG1 allotype may impact signaling via the FcγRIIIa receptor. FIG. 43A shows sequence information of IgG1 allotype IGHG1*08 and IGHG1*01, which differ by one amino acid in the CH1 domain. The differing residue between these two allotypes is highlighted, and surrounding residues are provided for reference. Position given in both IMGT and EU numbering. FIG. 43B shows clinical ipilimumab (Yervoy) uses the IGHG1*08 allotype, and results in lower FcγRIIIa signaling than Ipilimumab and GIGA-564 produced by GigaGen, which use the IGHG1*01. These results suggest that allotype may impact FcγRIIIa signaling. ADCC reporter bioassays for human FcγRIIIa, V variant (G7011) were purchased from Promega Corporation. The assays were carried out following the manufacturer's instructions. Briefly, CHO target cells stably expressing human CTLA-4 with the Y201G mutation to enhance cell surface expression were suspended in RPMI 1640+4% FBS media with the indicated antibody and incubated at 37° C. for 30 minutes. Jurkat/NFAT-Luc effector cells expressing human FcγRIIIa, V variant were added to each well at an effector:target ratio of 5:1 and incubated at 37° C. for 6 hours. Luciferase activity was measured by using the included Bio-Glo Luciferase Assay Reagent with the SpectraMax i3x reader. Luciferase activity measured in relative luminescence units (RLU) were plotted against the concentration of antibody.

[0139] Table 23. In vitro characterization of scFvs reformatted as full-length antibodies. kon, koff, and KD of the indicated CTLA-4 mAbs for soluble human CTLA-4 was determined by SPR (Carterra). Geometric MFI of the indicated CTLA-4 mAbs bound to CTLA-4⁺ or CD27⁺ CHO cells as detected by a secondary human IgG antibody and flow cytometry. Affinity (KD) of the indicated CTLA-4 mAbs for soluble cynomolgus CTLA-4 was determined by a single antigen concentration BLI measurement (Octet). The ability of each aCTLA-4 mAb to block CTLA-4 binding to CD80/CD86 was determined by a cell-based assay (Promega). Due to constraints on sample size in each Promega bioassay kit, this set of aCTLA-4 mAbs was analyzed using multiple plates (plate letters correspond to Plate A-D in FIG. 20D). To control for plate-to-plate variability in maximum signal, the ipilimumab analog was run on each plate; a representative sample was used for this table.

[0140] Table 24. GIGA-564 has minimal ability to block CD80 or CD86 from binding CTLA-4. Summary of blocking ELISA data from FIG. 13B. Absorbance values from the detected CD80 or CD86 were normalized to signal from ELISA plates incubated with pembrolizumab. The data were then analyzed and fit by nonlinear regression. The normalized maximum and minimum signals and the IC50 for blocking are provided.

[0141] Table 25. Fc receptor signaling of GIGA-564 and ipilimumab. Summary of FcR Bioassay results from FIG. 16. Luminescence (RLU) data from the Bioassay were fit by nonlinear regression. The maximum signal and EC50 for FcR signaling are provided.

[0142] Table 26. CTLA-4 antibody sequences. Amino acid sequences are provided of the IgK and IgG variable regions for the 14 characterized full-length CTLA-4 antibodies.

[0143] Table 27. Reagent antibodies for immunophenotyping. Antibody clone details used for immunophenotyping are listed.

[0144] Table 32-33. A14 Light Chain CDR sequences and A14 Heavy Chain CDR sequences for GIGA-564 identified by different algorithms (Antibody A14):

### 7. DETAILED DESCRIPTION

### 7.1. Definitions

[0145] Unless otherwise defined herein, scientific and technical terms used in connection with the present disclosure shall have the meanings that are commonly understood by those of ordinary skill in the art. Further, unless otherwise required by context, singular terms shall include pluralities and plural terms shall include the singular. Generally, nomenclatures used in connection with, and techniques of, cell and tissue culture, molecular biology, immunology, microbiology, genetics and protein and nucleic acid chemistry and hybridization described herein are those well-known and commonly used in the art. The methods and techniques of the present disclosure are generally performed according to conventional methods well known in the art and as described in various general and more specific references that are cited and discussed throughout the present specification unless otherwise indicated. See, e.g., Sambrook et al. Molecular Cloning: A Laboratory Manual, 2d ed., Cold Spring Harbor Laboratory Press, Cold Spring Harbor, N.Y. (1989) and Ausubel et al., Current Protocols in Molecular Biology, Greene Publishing Associates (1992), and Harlow and Lane Antibodies: A Laboratory Manual Cold Spring Harbor Laboratory Press, Cold Spring Harbor, N.Y. (1990), which are incorporated herein by reference. Enzymatic reactions and purification techniques are performed according to manufacturer's specifications, as commonly accomplished in the art or as described herein. The terminology used in connection with, and the laboratory procedures and techniques of, analytical chemistry, synthetic organic chemistry, and medicinal and pharmaceutical chemistry described herein are those well-known and commonly used in the art. Standard techniques can be used for chemical syntheses, chemical analyses, pharmaceutical preparation, formulation, and delivery, and treatment of patients.

[0146] The following terms, unless otherwise indicated, shall be understood to have the following meanings:

[0147] The terms “CTLA-4,” “CTLA-4 protein,” and “CTLA-4 antigen” are used interchangeably herein to refer to human CTLA-4, or any variants (e.g., splice variants and allelic variants), isoforms, and species homologs of human CTL A-4 that are naturally expressed by cells, or that are expressed by cells transfected with a ctla4 gene. In some embodiments, the CTLA-4 protein is a CTLA-4 protein naturally expressed by a primate (e.g., a monkey or a human), a rodent (e.g., a mouse or a rat), a dog, a camel, a cat, a cow, a goat, a horse, or a sheep. In some embodiments, the CTLA-4 protein is human CTLA-4 (hCTLA-4; SEQ ID NO: 7001).

[0148] The term “immunoglobulin” refers to a class of structurally related proteins generally comprising two pairs of polypeptide chains: one pair of light (L) chains and one pair of heavy (H) chains. In an “intact immunoglobulin,” all four of these chains are interconnected by disulfide bonds. The structure of immunoglobulins has been well characterized. See, e.g., Paul, Fundamental Immunology 7th ed., Ch. 5 (2013) Lippincott Williams & Wilkins, Philadelphia, Pa. Briefly, each heavy chain typically comprises a heavy chain variable region (V_{H}) and a heavy chain constant region (CH). The heavy chain constant region typically comprises three domains, abbreviated C_{H1}, C_{H2}, and C_{H3}. Each light chain typically comprises a light chain variable region (V_{L}) and a light chain constant region. The light chain constant region typically comprises one domain, abbreviated CL.

[0149] The term “antigen-binding protein” (ABP) refers to a protein comprising one or more antigen-binding domains that specifically bind to an antigen or epitope. In some embodiments, the antigen-binding domain binds the antigen or epitope with specificity and affinity similar to that of naturally occurring antibodies. In some embodiments, the ABP comprises an antibody. In some embodiments, the ABP consists of an antibody. In some embodiments, the ABP consists essentially of an antibody. In some embodiments, the ABP comprises an alternative scaffold. In some embodiments, the ABP consists of an alternative scaffold. In some embodiments, the ABP consists essentially of an alternative scaffold. In some embodiments, the ABP comprises an antibody fragment. In some embodiments, the ABP consists of an antibody fragment. In some embodiments, the ABP consists essentially of an antibody fragment. A “CTLA-4 ABP,” “anti-CTLA-4 ABP,” or “CTLA-4-specific ABP” is an ABP, as provided herein, which specifically binds to the antigen CTLA-4. In some embodiments, the ABP binds the extracellular domain of CTLA-4. In certain embodiments, a CTLA-4 ABP provided herein binds to an epitope of CTLA-4 that is conserved between or among CTLA-4 proteins from different species.

[0150] The term “antibody” is used herein in its broadest sense and includes certain types of immunoglobulin molecules comprising one or more antigen-binding domains that specifically bind to an antigen or epitope. An antibody specifically includes intact antibodies (e.g., intact immunoglobulins), antibody fragments, and multi-specific antibodies. One example of an antigen-binding domain is an antigen-binding domain formed by a V_{H}-V_{L} dimer. An antibody is one type of ABP.

[0151] The term “afucosylation” or “afucosylated” in the context of an Fc refers to a substantial lack of core fucosylation of the N-glycan covalently attached, directly or indirectly, to the N-glycosylation site, e.g., amino acid residue position 297 of the human IgG1 Fc region, numbered according to the EU index (Kabat et al., Sequences of Proteins of Immunological Interest, 5th Ed. Public Health Service, National Institutes of Health, Bethesda, Md. (1991)), or the corresponding residue in non-IgG1 or non-human IgG1 immunoglobulins.

[0152] When the fucosylation rate is indicated in the context of a composition comprising antibodies, the rate indicates the proportion of focusylated antibodies among the total antibodies in the composition. For example, 70% of fucosylation indicates that 70% of the antibodies in the composition are fucosylated and 30% of the antibodies in the composition are afucosylated.

[0153] The term “alternative scaffold” refers to a molecule in which one or more regions may be diversified to produce one or more antigen-binding domains that specifically bind to an antigen or epitope. In some embodiments, the antigen-binding domain binds the antigen or epitope with specificity and affinity similar to that of naturally occurring antibodies. Exemplary alternative scaffolds include those derived from fibronectin (e.g., Adnectins™), the β-sandwich (e.g., iMab), lipocalin (e.g., Anticalins®), EETI-II/AGRP, BPTI/LACI-D1/ITI-D2 (e.g., Kunitz domains), thioredoxin peptide aptamers, protein A (e.g., Affibody®), ankyrin repeats (e.g., DARPins), gamma-B-crystallin/ubiquitin (e.g., Affilins), CTLD3 (e.g., Tetranectins), Fynomers, and (LDLR-A module) (e.g., Avimers). Additional information on alternative scaffolds is provided in Binz et al., Nat. Biotechnol., 2005 23:1257-1268; Skerra, Current Opin. in Biotech., 2007 18:295-304; and Silacci et al., J. Biol. Chem., 2014, 289:14392-14398; each of which is incorporated by reference in its entirety. An alternative scaffold is one type of ABP.

[0154] The term “antigen-binding domain” means the portion of an ABP that is capable of specifically binding to an antigen or epitope.

[0155] The terms “full length antibody,” “intact antibody,” and “whole antibody” are used herein interchangeably to refer to an antibody having a structure substantially similar to a naturally occurring antibody structure and having heavy chains that comprise an Fc region.

[0156] The term “Fc region” means the C-terminal region of an immunoglobulin heavy chain that, in naturally occurring antibodies, interacts with Fc receptors and certain proteins of the complement system. The structures of the Fc regions of various immunoglobulins, and the glycosylation sites contained therein, are known in the art. See Schroeder and Cavacini, J Allergy Clin. Immunol., 2010, 125:S41-52, incorporated by reference in its entirety. The Fc region may be a naturally occurring Fc region, or an Fc region modified as described elsewhere in this disclosure.

[0157] The V_{H} and V_{L} regions may be further subdivided into regions of hypervariability (“hypervariable regions (HVRs);” also called “complementarity determining regions” (CDRs)) interspersed with regions that are more conserved. The more conserved regions are called framework regions (FRs). Each V_{H} and V_{L} generally comprises three CDRs and four FRs, arranged in the following order (from N-terminus to C-terminus): FR1-CDR1-FR2-CDR2-FR3-CDR3-FR4. The CDRs are involved in antigen binding, and influence antigen specificity and binding affinity of the antibody. See Kabat et al., Sequences of Proteins of Immunological Interest 5th ed. (1991) Public Health Service, National Institutes of Health, Bethesda, Md., incorporated by reference in its entirety.

[0158] The light chain from any vertebrate species can be assigned to one of two types, called kappa (κ) and lambda (λ), based on the sequence of its constant domain.

[0159] The heavy chain from any vertebrate species can be assigned to one of five different classes (or isotypes): IgA, IgD, IgE. IgG, and IgM. These classes are also designated a, δ, ε, γ, and μ, respectively. The IgG and IgA classes are further divided into subclasses on the basis of differences in sequence and function. Humans express the following subclasses: IgG1, IgG2, IgG3, IgG4, IgA1, and IgA2.

[0160] The amino acid sequence boundaries of a CDR can be determined by one of skill in the art using any of a number of known numbering schemes, including those described by Kabat et al., supra (“Kabat” numbering scheme); Al-Lazikani et al., 1997, J. Mol. Biol., 273:927-948 (“Chothia” numbering scheme); MacCallum et al., 1996, J Mol. Biol. 262:732-745 (“Contact” numbering scheme); Lefranc et al., Dev. Comp. Immunol., 2003, 27:55-77 (“IMGT” numbering scheme); and Honegge and Plückthun, J. Mol. Biol, 2001, 309:657-70 (“AHo” numbering scheme); each of which is incorporated by reference in its entirety.

[0161] Table 1 provides the positions of CDR1-L (CDR1 of V_{L}), CDR2-L (CDR2 of V_{L}), CDR3-L (CDR3 of V_{L}), CDR1-H (CDR1 of V_{H}), CDR2-H (CDR2 of V_{H}), and CDR3-H (CDR3 of V_{H}), as identified by the Kabat and Chothia schemes. For CDR1-H, residue numbering is provided using both the Kabat and Chothia numbering schemes.

[0162] CDRs may be assigned, for example, using antibody numbering software, such as Abnum, available at www.bioinf.org.uk/abs/abnum/, and described in Abhinandan and Martin, Immunology, 2008, 45:3832-3839, incorporated by reference in its entirety.

TABLE 1
Residues in CDRs according to Kabat
and Chothia numbering schemes.

| CDR | Kabat | Chothia |
|---|---|---|
| CDR1-L | 24-34 | 24-34 |
| CDR2-L | 50-56 | 50-56 |
| CDR3-L | 89-97 | 89-97 |
| CDR1-H (Kabat Numbering) | 31-35B | 26-32 or 34* |
| CDR1-H (Chothia Numbering) | 31-35 | 26-32 |
| CDR2-H | 50-65 | 52-56 |
| CDR3-H | 95-102 | 95-102 |

*The C-terminus of CDR1-H, when numbered using the Kabat numbering convention, varies between 32 and 34, depending on the length of the CDR.

[0163] The “EU numbering scheme” is generally used when referring to a residue in an antibody heavy chain constant region (e.g., as reported in Kabat et al., supra).

[0164] An “antibody fragment” comprises a portion of an intact antibody, such as the antigen-binding or variable region of an intact antibody. Antibody fragments include, for example, Fv fragments, Fab fragments, F(ab′)₂ fragments, Fab′ fragments, scFv (sFv) fragments, and scFv-Fc fragments.

[0165] “Fv” fragments comprise a non-covalently-linked dimer of one heavy chain variable domain and one light chain variable domain.

[0166] “Fab” fragments comprise, in addition to the heavy and light chain variable domains, the constant domain of the light chain and the first constant domain (C_{H1}) of the heavy chain. Fab fragments may be generated, for example, by recombinant methods or by papain digestion of a full-length antibody.

[0167] “F(ab′)₂” fragments contain two Fab′ fragments joined, near the hinge region, by disulfide bonds. F(ab′)₂ fragments may be generated, for example, by recombinant methods or by pepsin digestion of an intact antibody. The F(ab′) fragments can be dissociated, for example, by treatment with ß-mercaptoethanol.

[0168] “Single-chain Fv” or “sFv” or “scFv” antibody fragments comprise a V_{H} domain and a V_{L} domain in a single polypeptide chain. The V_{H} and V_{L} are generally linked by a peptide linker. See Pluckthun A. (1994). In some embodiments, the linker is a (GGGGS)ₙ(SEQ ID NO: 11968). In some embodiments, n=1, 2, 3, 4, 5, or 6. See Antibodies from Escherichia coli. In Rosenberg M. & Moore G. P. (Eds.), The Pharmacology of Monoclonal Antibodies vol. 113 (pp. 269-315). Springer-Verlag, New York, incorporated by reference in its entirety.

[0169] “scFv-Fc” fragments comprise an scFv attached to an Fc domain. For example, an Fc domain may be attached to the C-terminal of the scFv. The Fc domain may follow the V_{H} or V_{L}, depending on the orientation of the variable domains in the scFv (i.e., V_{H}-V_{L} or V_{L}-V_{H}). Any suitable Fc domain known in the art or described herein may be used. In some cases, the Fc domain comprises an IgG4 Fc domain.

[0170] The term “single domain antibody” refers to a molecule in which one variable domain of an antibody specifically binds to an antigen without the presence of the other variable domain. Single domain antibodies, and fragments thereof, are described in Arabi Ghahroudi et al., FEBS Letters, 1998, 414:521-526 and Muyldermans et al., Trends in Biochem. Sci., 2001, 26:230-245, each of which is incorporated by reference in its entirety.

[0171] A “monospecific ABP” is an ABP that comprises a binding site that specifically binds to a single epitope. An example of a monospecific ABP is a naturally occurring IgG molecule which, while divalent, recognizes the same epitope at each antigen-binding domain. The binding specificity may be present in any suitable valency.

[0172] The term “monoclonal antibody” refers to an antibody from a population of substantially homogeneous antibodies. A population of substantially homogeneous antibodies comprises antibodies that are substantially similar and that bind the same epitope(s), except for variants that may normally arise during production of the monoclonal antibody. Such variants are generally present in only minor amounts. A monoclonal antibody is typically obtained by a process that includes the selection of a single antibody from a plurality of antibodies. For example, the selection process can be the selection of a unique clone from a plurality of clones, such as a pool of hybridoma clones, phage clones, yeast clones, bacterial clones, or other recombinant DNA clones. The selected antibody can be further altered, for example, to improve affinity for the target (“affinity maturation”), to humanize the antibody, to improve its production in cell culture, and/or to reduce its immunogenicity in a subject.

[0173] The term “chimeric antibody” refers to an antibody in which a portion of the heavy and/or light chain is derived from a particular source or species, while the remainder of the heavy and/or light chain is derived from a different source or species.

[0174] “Humanized” forms of non-human antibodies are chimeric antibodies that contain minimal sequence derived from the non-human antibody. A humanized antibody is generally a human antibody (recipient antibody) in which residues from one or more CDRs are replaced by residues from one or more CDRs of a non-human antibody (donor antibody). The donor antibody can be any suitable non-human antibody, such as a mouse, rat, rabbit, chicken, or non-human primate antibody having a desired specificity, affinity, or biological effect. In some instances, selected framework region residues of the recipient antibody are replaced by the corresponding framework region residues from the donor antibody. Humanized antibodies may also comprise residues that are not found in either the recipient antibody or the donor antibody. Such modifications may be made to further refine antibody function. For further details, see Jones et al., Nature, 1986, 321:522-525; Riechmann et al., Nature, 1988, 332:323-329; and Presta, Curr. Op. Struct. Biol., 1992, 2:593-596, each of which is incorporated by reference in its entirety.

[0175] A “human antibody” is one which possesses an amino acid sequence corresponding to that of an antibody produced by a human or a human cell, or derived from a non-human source that utilizes a human antibody repertoire or human antibody-encoding sequences (e.g., obtained from human sources or designed de novo). Human antibodies specifically exclude humanized antibodies. In some embodiments, rodents are genetically engineered to replace their rodent antibody sequences with human antibodies.

[0176] An “isolated ABP” or “isolated nucleic acid” is an ABP or nucleic acid that has been separated and/or recovered from a component of its natural environment. Components of the natural environment may include enzymes, hormones, and other proteinaceous or nonproteinaceous materials. In some embodiments, an isolated ABP is purified to a degree sufficient to obtain at least 15 residues of N-terminal or internal amino acid sequence, for example by use of a spinning cup sequenator. In some embodiments, an isolated ABP is purified to homogeneity by gel electrophoresis (e.g., SDS-PAGE) under reducing or nonreducing conditions, with detection by Coomassie blue or silver stain. An isolated ABP includes an ABP in situ within recombinant cells, since at least one component of the ABP's natural environment is not present. In some embodiments, an isolated ABP or isolated nucleic acid is prepared by at least one purification step. In some embodiments, an isolated ABP or isolated nucleic acid is purified to at least 80%, 85%, 90%, 95%, or 99% by weight. In some embodiments, an isolated ABP or isolated nucleic acid is purified to at least 80%, 85%, 90%, 95%, or 99% by volume. In some embodiments, an isolated ABP or isolated nucleic acid is provided as a solution comprising at least 85%, 90%, 95%, 98%, 99% to 100% ABP or nucleic acid by weight. In some embodiments, an isolated ABP or isolated nucleic acid is provided as a solution comprising at least 85%, 90%, 95%, 98%, 99% to 100% ABP or nucleic acid by volume.

[0177] “Affinity” refers to the strength of the sum total of non-covalent interactions between a single binding site of a molecule (e.g., an ABP) and its binding partner (e.g., an antigen or epitope). Unless indicated otherwise, as used herein, “affinity” refers to intrinsic binding affinity, which reflects a 1:1 interaction between members of a binding pair (e.g., ABP and antigen or epitope). The affinity of a molecule X for its partner Y can be represented by the dissociation equilibrium constant (K_{D}). The kinetic components that contribute to the dissociation equilibrium constant are described in more detail below. Affinity can be measured by common methods known in the art, including those described herein. Affinity can be determined, for example, using surface plasmon resonance (SPR) technology (e.g., BIACORE©) or biolayer interferometry (e.g., FORTEBIO©).

[0178] With regard to the binding of an ABP to a target molecule, the terms “bind,” “specific binding,” “specifically binds to.” “specific for,” “selectively binds,” and “selective for” a particular antigen (e.g., a polypeptide target) or an epitope on a particular antigen mean binding that is measurably different from a non-specific or non-selective interaction (e.g., with a non-target molecule). Specific binding can be measured, for example, by measuring binding to a target molecule and comparing it to binding to a non-target molecule. Specific binding can also be determined by competition with a control molecule that mimics the epitope recognized on the target molecule. In that case, specific binding is indicated if the binding of the ABP to the target molecule is competitively inhibited by the control molecule. In some embodiments, the affinity of a CTLA-4 ABP for a non-target molecule is less than about 50% of the affinity for CTLA-4. In some embodiments, the affinity of a CTLA-4 ABP for a non-target molecule is less than about 40% of the affinity for CTLA-4. In some embodiments, the affinity of a CTLA-4 ABP for a non-target molecule is less than about 30% of the affinity for CTLA-4. In some embodiments, the affinity of a CTLA-4 ABP for a non-target molecule is less than about 20% of the affinity for CTLA-4. In some embodiments, the affinity of a CTLA-4 ABP for a non-target molecule is less than about 10% of the affinity for CTLA-4. In some embodiments, the affinity of a CTLA-4 ABP for a non-target molecule is less than about 1% of the affinity for CTLA-4. In some embodiments, the affinity of a CTLA-4 ABP for a non-target molecule is less than about 0.1% of the affinity for CTLA-4.

[0179] The term “k_{d}” (sec⁻¹), as used herein, refers to the dissociation rate constant of a particular ABP-antigen interaction. This value is also referred to as the koff value.

[0180] The term “kₐ” (M⁻¹×sec⁻¹), as used herein, refers to the association rate constant of a particular ABP-antigen interaction. This value is also referred to as the kₒₙ value.

[0181] The term “K_{D}” (M), as used herein, refers to the dissociation equilibrium constant of a particular ABP-antigen interaction. K_{D}=k_{d}/kₐ.

[0182] The term “K_{A}” (M-1), as used herein, refers to the association equilibrium constant of a particular ABP-antigen interaction. K_{A}=k_{d}/kₐ.

[0183] An “affinity matured” ABP is one with one or more alterations (e.g., in one or more CDRs or FRs) that result in an improvement in the affinity of the ABP for its antigen, compared to a parent ABP which does not possess the alteration(s). In one embodiment, an affinity matured ABP has nanomolar or picomolar affinity for the target antigen. Affinity matured ABPs may be produced using a variety of methods known in the art. For example, Marks et al. (Bio/Technology, 1992, 10:779-783, incorporated by reference in its entirety) describes affinity maturation by V_{H} and V_{L} domain shuffling. Random mutagenesis of CDR and/or framework residues is described by, for example, Barbas et al. (Proc. Nat. Acad. Sci. U.S.A., 1994, 91:3809-3813); Schier et al., Gene, 1995, 169:147-155; Yelton et al., J. Immunol., 1995, 155:1994-2004; Jackson et al., J. Immunol., 1995, 154:3310-33199; and Hawkins et al, J. Mol. Biol., 1992, 226:889-896; each of which is incorporated by reference in its entirety.

[0184] An “immunoconjugate” is an ABP conjugated to one or more heterologous molecule(s).

[0185] “Effector functions” refer to those biological activities mediated by the Fc region of an antibody, which activities may vary depending on the antibody isotype. Examples of antibody effector functions include C1q binding to activate complement dependent cytotoxicity (CDC), Fc receptor binding to activate antibody-dependent cellular cytotoxicity (ADCC), and antibody dependent cellular phagocytosis (ADCP).

[0186] When used herein in the context of two or more ABPs, the term “competes with” or “cross-competes with” indicates that the two or more ABPs compete for binding to an antigen (e.g., CTLA-4). In one exemplary assay, CTLA-4 is coated on a surface and contacted with a first CTLA-4 ABP, after which a second CTLA-4 ABP is added. In another exemplary assay, a first CTLA-4 ABP is coated on a surface and contacted with CTLA-4, and then a second CTLA-4 ABP is added. If the presence of the first CTLA-4 ABP reduces binding of the second CTLA-4 ABP, in either assay, then the ABPs compete. The term “competes with” also includes combinations of ABPs where one ABP reduces binding of another ABP, but where no competition is observed when the ABPs are added in the reverse order. However, in some embodiments, the first and second ABPs inhibit binding of each other, regardless of the order in which they are added. In some embodiments, one ABP reduces binding of another ABP to its antigen by at least 25%, at least 50%, at least 60%, at least 70%, at least 80%, at least 85%, at least 90%, or at least 95%. A skilled artisan can select the concentrations of the antibodies used in the competition assays based on the affinities of the ABPs for CTLA-4 and the valency of the ABPs. The assays described in this definition are illustrative, and a skilled artisan can utilize any suitable assay to determine if antibodies compete with each other. Suitable assays are described, for example, in Cox et al., “Immunoassay Methods,” in Assay Guidance Manual [Internet], Updated Dec. 24, 2014 (www(dot)ncbi(dot)nlm(dot)nih(dot)gov/books/NBK92434/; accessed Sep. 29, 2015); Silman et al., Cytometry, 2001, 44:30-37; and Finco et al., J. Pharm. Biomed. Anal., 2011, 54:351-358; each of which is incorporated by reference in its entirety.

[0187] The term “epitope” means a portion of an antigen the specifically binds to an ABP. Epitopes frequently consist of surface-accessible amino acid residues and/or sugar side chains and may have specific three-dimensional structural characteristics, as well as specific charge characteristics. Conformational and non-conformational epitopes are distinguished in that the binding to the former but not the latter may be lost in the presence of denaturing solvents. An epitope may comprise amino acid residues that are directly involved in the binding, and other amino acid residues, which are not directly involved in the binding. The epitope to which an ABP binds can be determined using known techniques for epitope determination such as, for example, testing for ABP binding to CTLA-4 variants with different point-mutations, or to chimeric CTLA-4 variants.

[0188] Percent “identity” between a polypeptide sequence and a reference sequence, is defined as the percentage of amino acid residues in the polypeptide sequence that are identical to the amino acid residues in the reference sequence, after aligning the sequences and introducing gaps, if necessary, to achieve the maximum percent sequence identity. Alignment for purposes of determining percent amino acid sequence identity can be achieved in various ways that are within the skill in the art, for instance, using publicly available computer software such as BLAST, BLAST-2, ALIGN, MEGALIGN (DNASTAR), CLUSTALW, CLUSTAL OMEGA, or MUSCLE software. Those skilled in the art can determine appropriate parameters for aligning sequences, including any algorithms needed to achieve maximal alignment over the full length of the sequences being compared.

[0189] A “conservative substitution” or a “conservative amino acid substitution,” refers to the substitution an amino acid with a chemically or functionally similar amino acid. Conservative substitution tables providing similar amino acids are well known in the art. By way of example, the groups of amino acids provided in TABLES 2-4 are, in some embodiments, considered conservative substitutions for one another.

TABLE 2
Selected groups of amino acids that are considered conservative
substitutions for one another, in certain embodiments.

| | |
|---|---|
| Acidic Residues | P and E |
| Basic Residues | K, R, and H |
| Hydrophilic Uncharged Residues | S, T, N, and Q |
| Aliphatic Uncharged Residues | G, A, V, L, and I |
| Non-polar Uncharged Residues | C, M, and P |
| Aromatic Residues | F, Y, and W |

TABLE 3
Additional selected groups of amino acids that
are considered conservative substitutions
for one another, in certain embodiments.

| | |
|---|---|
| Group 1 | A, S, and T |
| Group 2 | D and E |
| Group 3 | N and Q |
| Group 4 | R and K |
| Group 5 | I, L, and M |
| Group 6 | F, Y, and W |

TABLE 4
Further selected groups of amino acids that are considered conservative
substitutions for one another, in certain embodiments.

| | |
|---|---|
| Group A | A and G |
| Group B | D and E |
| Group C | N and Q |
| Group D | R, K, and H |
| Group E | I, L, M, V |
| Group F | F, Y, and W |
| Group G | S and T |
| Group H | C and M |

[0190] Additional conservative substitutions may be found, for example, in Creighton, Proteins: Structures and Molecular Properties 2nd ed. (1993) W. H. Freeman & Co., New York, N.Y. An ABP generated by making one or more conservative substitutions of amino acid residues in a parent ABP is referred to as a “conservatively modified variant.”

[0191] The term “treating” (and variations thereof such as “treat” or “treatment”) refers to clinical intervention in an attempt to alter the natural course of a disease or condition in a subject in need thereof. Treatment can be performed both for prophylaxis and during the course of clinical pathology. Desirable effects of treatment include preventing occurrence or recurrence of disease, alleviation of symptoms, diminish of any direct or indirect pathological consequences of the disease, preventing metastasis, decreasing the rate of disease progression, amelioration or palliation of the disease state, and remission or improved prognosis.

[0192] As used herein, the term “therapeutically effective amount” or “effective amount” refers to an amount of an ABP or pharmaceutical composition provided herein that, when administered to a subject, is effective to treat a disease or disorder.

[0193] As used herein, the term “subject” means a mammalian subject. Exemplary subjects include humans, monkeys, dogs, cats, mice, rats, cows, horses, camels, goats, rabbits, and sheep. In certain embodiments, the subject is a human. In some embodiments the subject has a disease or condition that can be treated with an ABP provided herein. In some embodiments, the disease or condition is a cancer. In some embodiments, the disease or condition is a viral infection.

[0194] The term “package insert” is used to refer to instructions customarily included in commercial packages of therapeutic or diagnostic products (e.g., kits) that contain information about the indications, usage, dosage, administration, combination therapy, contraindications and/or warnings concerning the use of such therapeutic or diagnostic products.

[0195] The term “cytotoxic agent,” as used herein, refers to a substance that inhibits or prevents a cellular function and/or causes cell death or destruction.

[0196] A “chemotherapeutic agent” refers to a chemical compound useful in the treatment of cancer. Chemotherapeutic agents include “anti-hormonal agents” or “endocrine therapeutics” which act to regulate, reduce, block, or inhibit the effects of hormones that can promote the growth of cancer.

[0197] The term “cytostatic agent” refers to a compound or composition which arrests growth of a cell either in vitro or in vivo. In some embodiments, a cytostatic agent is an agent that reduces the percentage of cells in S phase. In some embodiments, a cytostatic agent reduces the percentage of cells in S phase by at least about 20%, at least about 40%, at least about 60%, or at least about 80%.

[0198] The term “tumor” refers to all neoplastic cell growth and proliferation, whether malignant or benign, and all pre-cancerous and cancerous cells and tissues. The terms “cancer,” “cancerous,” “cell proliferative disorder,” “proliferative disorder” and “tumor” are not mutually exclusive as referred to herein. The terms “cell proliferative disorder” and “proliferative disorder” refer to disorders that are associated with some degree of abnormal cell proliferation. In some embodiments, the cell proliferative disorder is a cancer.

[0199] The term “pharmaceutical composition” refers to a preparation which is in such form as to permit the biological activity of an active ingredient contained therein to be effective in treating a subject, and which contains no additional components which are unacceptably toxic to the subject.

[0200] The terms “modulate” and “modulation” refer to reducing or inhibiting or, alternatively, activating or increasing, a recited variable.

[0201] The terms “increase” and “activate” refer to an increase of 10%, 20%, 30%, 40%, 50%, 60%, 70%, 75%, 80%, 85%, 90%, 95%, 100%, 2-fold, 3-fold, 4-fold, 5-fold, 10-fold, 20-fold, 50-fold, 100-fold, or greater in a recited variable.

[0202] The terms “reduce” and “inhibit” refer to a decrease of 10%, 20%, 30%, 40%, 50%, 60%, 70%, 75%, 80%, 85%, 90%, 95%, 2-fold, 3-fold, 4-fold, 5-fold, 10-fold, 20-fold, 50-fold, 100-fold, or greater in a recited variable.

[0203] The term “agonize” refers to the activation of receptor signaling to induce a biological response associated with activation of the receptor. An “agonist” is an entity that binds to and agonizes a receptor.

[0204] The term “antagonize” refers to the inhibition of receptor signaling to inhibit a biological response associated with activation of the receptor. An “antagonist” is an entity that binds to and antagonizes a receptor.

[0205] The term “effector T cell” includes T helper (i.e., CD4+) cells and cytotoxic (i.e., CD8+) T cells. CD4+ effector T cells contribute to the development of several immunologic processes, including maturation of B cells into plasma cells and memory B cells, and activation of cytotoxic T cells and macrophages. CD8+ effector T cells destroy virus-infected cells and tumor cells. See Seder and Ahmed, Nature Immunol., 2003, 4:835-842, incorporated by reference in its entirety, for additional information on effector T cells.

[0206] The term “regulatory T cell” includes cells that regulate immunological tolerance, for example, by suppressing effector T cells. In some embodiments, the regulatory T cell has a CD4+CD25+Foxp3+ phenotype. In some embodiments, the regulatory T cell has a CD8+CD25+ phenotype. See Nocentini et al., Br. J. Pharmacol., 2012, 165:2089-2099, incorporated by reference in its entirety, for additional information on regulatory T cells.

[0207] The term “dendritic cell” refers to a professional antigen-presenting cell capable of activating a naïve T cell and stimulating growth and differentiation of a B cell.

[0208] A “variant” of a polypeptide (e.g., an antibody) comprises an amino acid sequence wherein one or more amino acid residues are inserted into, deleted from and/or substituted into the amino acid sequence relative to the native polypeptide sequence, and retains essentially the same biological activity as the native polypeptide. The biological activity of the polypeptide can be measured using standard techniques in the art (for example, if the variant is an antibody, its activity may be tested by binding assays, as described herein). Variants of the present disclosure include fragments, analogs, recombinant polypeptides, synthetic polypeptides, and/or fusion proteins.

[0209] A “derivative” of a polypeptide is a polypeptide (e.g., an antibody) that has been chemically modified, e.g., via conjugation to another chemical moiety such as, for example, polyethylene glycol, albumin (e.g., human serum albumin), phosphorylation, and glycosylation. Unless otherwise indicated, the term “antibody” includes, in addition to antibodies comprising two full-length heavy chains and two full-length light chains, derivatives, variants, fragments, and muteins thereof, examples of which are described below.

[0210] A nucleotide sequence is “operably linked” to a regulatory sequence if the regulatory sequence affects the expression (e.g., the level, timing, or location of expression) of the nucleotide sequence. A “regulatory sequence” is a nucleic acid that affects the expression (e.g., the level, timing, or location of expression) of a nucleic acid to which it is operably linked. The regulatory sequence can, for example, exert its effects directly on the regulated nucleic acid, or through the action of one or more other molecules (e.g., polypeptides that bind to the regulatory sequence and/or the nucleic acid). Examples of regulatory sequences include promoters, enhancers and other expression control elements (e.g., polyadenylation signals). Further examples of regulatory sequences are described in, for example, Goeddel, 1990, Gene Expression Technology: Methods in Enzymology 185, Academic Press, San Diego, Calif. and Baron et al., 1995, Nucleic Acids Res. 23:3605-06. [0078]

[0211] A “host cell” is a cell that can be used to express a nucleic acid, e.g., a nucleic acid of the present disclosure. A host cell can be a prokaryote, for example, E. coli, or it can be a eukaryote, for example, a single-celled eukaryote (e.g., a yeast or other fungus), a plant cell (e.g., a tobacco or tomato plant cell), an animal cell (e.g., a human cell, a monkey cell, a hamster cell, a rat cell, a mouse cell, or an insect cell) or a hybridoma. Examples of host cells include CS-9 cells, the COS-7 line of monkey kidney cells (ATCC CRL 1651) (see Gluzman et al., 1981, Cell 23:175), L cells, C127 cells, 3T3 cells (ATCC CCL 163), Chinese hamster ovary (CHO) cells or their derivatives such as Veggie CHO and related cell lines which grow in serum-free media (see Rasmussen et al., 1998, Cytotechnology 28:31), HeLa cells, BHK (ATCC CRL 10) cell lines, the CV1/EBNA cell line derived from the African green monkey kidney cell line CV1 (ATCC CCL 70) (see McMahan et al., 1991, EMBO J. 10:2821), human embryonic kidney cells such as 293, 293 EBNA or MSR 293, human epidermal A431 cells, human Colo205 cells, other transformed primate cell lines, normal diploid cells, cell strains derived from in vitro culture of primary tissue, primary explants, HL-60, U937, HaK or Jurkat cells. Typically, a host cell is a cultured cell that can be transformed or transfected with a polypeptide-encoding nucleic acid, which can then be expressed in the host cell.

[0212] The phrase “recombinant host cell” can be used to denote a host cell that has been transformed or transfected with a nucleic acid to be expressed. A host cell also can be a cell that comprises the nucleic acid but does not express it at a desired level unless a regulatory sequence is introduced into the host cell such that it becomes operably linked with the nucleic acid. It is understood that the term host cell refers not only to the particular subject cell but to the progeny or potential progeny of such a cell. Because certain modifications may occur in succeeding generations due to, e.g., mutation or environmental influence, such progeny may not, in fact, be identical to the parent cell, but are still included within the scope of the term as used herein.

[0213] In some embodiments, the host cell is used in adoptive cell therapy for delivery of the ABP to the subject.

### 7.2. Other Interpretational Conventions

[0214] Ranges recited herein are understood to be shorthand for all of the values within the range, inclusive of the recited endpoints. For example, a range of 1 to 50 is understood to include any number, combination of numbers, or sub-range from the group consisting of 1, 2, 3, 4, 5, 6, 7, 8, 9, 10, 11, 12, 13, 14, 15, 16, 17, 18, 19, 20, 21, 22, 23, 24, 25, 26, 27, 28, 29, 30, 31, 32, 33, 34, 35, 36, 37, 38, 39, 40, 41, 42, 43, 44, 45, 46, 47, 48, 49, and 50.

[0215] Unless otherwise indicated, reference to a compound that has one or more stereocenters intends each stereoisomer, and all combinations of stereoisomers, thereof.

### 7.3. Antigen Binding Protein

[0216] In one aspect, the present disclosure provides antigen binding proteins (e.g., antibodies, antibody fragments, antibody derivatives, antibody muteins, and antibody variants). In some embodiments, the ABP bind to CTLA-4. In particular, the present disclosure provides ABPs that bind to an epitope of CTLA-4, which is different from Ipilimumab. In some embodiments, the epitope comprises K130, Y139, L141, and I143, but not R70. In some embodiments, the ABP contacts amino acids K130, Y139, L141, I143 but does not contact amino acid R70 of the CTLA-4. In some embodiments, the ABP can bind CTLA-4 even while the CTPA-4 interacts with CD80/CD86. In some embodiments, an interaction between the ABP and amino acid L74A and/or E68 of the CTLA-4 is greater than an interaction between Ipilimumab and amino acid L74A of CTLA-4.

[0217] In some embodiments, the present disclosure provides antigen binding proteins that comprise a light chain variable region selected from the group consisting of A1LC-A28LC or a heavy chain variable region selected from the group consisting of A1HC-A28HC, and fragments, derivatives, muteins, and variants thereof. Such an antigen binding protein can be denoted using the nomenclature “LxHy,” wherein “x” corresponds to the number of the light chain variable region and “y” corresponds to the number of the heavy chain variable region as they are labeled in the sequences below. That is to say, for example, that “A1HC” denotes the heavy chain variable region comprising the amino acid sequence of SEQ ID NO: 101; “A1LC” denotes the light chain variable region comprising the amino acid sequence of SEQ ID NO: 1, and so forth. More generally speaking, “L2H1” refers to an antigen binding protein with a light chain variable region comprising the amino acid sequence of L2 (SEQ ID NO:2) and a heavy chain variable region comprising the amino acid sequence of H1 (SEQ ID NO:101). For clarity, all ranges denoted by at least two members of a group include all members of the group between and including the end range members. Thus, the group range A1-A28, includes all members between A1 and A28, as well as members A1 and A28 themselves. The group range A4-A6 includes members A4, A5, and A6, etc. In a particular embodiment, the ABP is A14.

[0218] In some embodiments, antigen binding proteins comprise variable (V(D)J) regions of both heavy and light chain sequences identical to one of the clones in the library of CTLA-4 binding clones, deposited under ATCC Accession NO. PTA-125512. In some embodiments, antigen binding proteins comprise variable (V(D)J) regions of either heavy or light chain sequence identical to one of the clones in the library of CTLA-4 binding clones, deposited under ATCC Accession NO. PTA-125512. In some embodiments, antigen binding proteins are expressed from the expression vector in one of the clones in the library of CTLA-4 binding clones, deposited under ATCC Accession NO. PTA-125512.

[0219] Also shown below are the locations of the CDRs (underlined) that create part of the antigen-binding site, while the Framework Regions (FRs) are the intervening segments of these variable domain sequences. In both light chain variable regions and heavy chain variable regions there are three CDRs (CDR1-3) and four FRs (FR 1-4). The CDR regions of each light and heavy chain also are grouped by antibody type (A1, A2, A3, etc.). Antigen binding proteins of the present disclosure include, for example, antigen binding proteins having a combination of light chain and heavy chain variable domains selected from the group of combinations consisting of L1H1 (antibody A1; used interchangeably herein as “aCTLA-4.9”). L2H2 (antibody A2; used interchangeably herein as “aCTLA-4.4”), L3H3 (antibody A3; used interchangeably herein as “aCTLA-4.2”), L4114 (antibody A4; used interchangeably herein as “aCTLA-4.29”), L5H5 (antibody A5; used interchangeably herein as “aCTLA-4.28”), L6H6 (antibody A6; used interchangeably herein as “aCTLA-4.26”), L7117 (antibody A7; used interchangeably herein as “aCTLA-4.3”), L8118 (antibody A8; used interchangeably herein as “aCTLA-4.1”), L9119 (antibody A9; used interchangeably herein as “aCTLA-4.24”), L10H10 (antibody A10; used interchangeably herein as “aCTLA-4.22”), L11H11 (antibody A11; used interchangeably herein as “aCTLA-4.31). L121112 (antibody A12; used interchangeably herein as “aCTLA-4.12”), L13H13 (antibody A13; used interchangeably herein as “aCTLA-4.14”), L131113 (antibody A13; used interchangeably herein as “aCTLA-4.14”) . . . and L28H28 (antibody A28). Antigen binding proteins of the present disclosure include, for example, antigen binding proteins having a light chain and heavy chain variable domain selected from the group consisting of L18H18 (antibody A18; used interchangeably herein as “aCTLA-4.11”), L15H15 (antibody A15; used interchangeably herein as “aCTLA-4.18”), L16H16 (antibody A16; used interchangeably herein as “aCTLA-4.5”), and L17H17 (antibody A17; used interchangeably herein as “aCTLA-4.17”). In some embodiments, ABPs of the present disclosure comprise a: L14H14 (antibody A14; used interchangeably herein as “aCTLA-4.15” or GIGA-564).

[0220] Antigen binding proteins of the present disclosure include, for example, antigen binding proteins having a light chain and heavy chain variable domain selected from the group consisting of L19H19 (antibody A19; used interchangeably herein as “aCTLA-4.7”), L20H20 (antibody A20; used interchangeably herein as “aCTLA-4.25”), L21H21 (antibody A21; used interchangeably herein as “aCTLA-4.10”), L22H22 (antibody A22; used interchangeably herein as “aCTLA-4.21”), L23H23 (antibody A23; used interchangeably herein as “aCTLA-4.23”), L24H24 (antibody A24; used interchangeably herein as “aCTLA-4.27”), L25H25 (antibody A25; used interchangeably herein as “aCTLA-4.32”), L26H26 (antibody A26; used interchangeably herein as “aCTLA-4.20”), and L27H27 (antibody A27; used interchangeably herein as “aCTLA-4.8”). In some embodiments, ABPs of the present disclosure comprise a light chain and heavy chain variable domain of L14H14 (antibody A14; used interchangeably herein as “aCTLA-4.15” or GIGA-564).

[0221] In some embodiments, antigen binding proteins comprise all six CDR sequences (three CDRs of light chain and three CDRs of heavy chain) identical to one of the clones in the library of CTLA-4 binding clones, deposited under ATCC Accession NO. PTA-125512. In some embodiments, antigen binding proteins comprise three out of six CDR sequences (three CDRs of light chain or three CDRs of heavy chain) identical to one of the clones in the library of CTLA-4 binding clones, deposited under ATCC Accession NO. PTA-125512. In some embodiments, antigen binding proteins comprise one, two, three, four, or five out of six CDR sequences identical to one of the clones in the library of CTLA-4 binding clones, deposited under ATCC Accession NO. PTA-125512.

[0222] In one embodiment, the present disclosure provides an antigen binding protein comprising a light chain variable domain comprising a sequence of amino acids that differs from the sequence of a light chain variable domain selected from the group consisting of L1 through L28 only at 15, 14, 13, 12, 11, 10, 9, 8, 7, 6, 5, 4, 3, 2, or 1 residues, wherein each such sequence difference is independently either a deletion, insertion, or substitution of one amino acid residue. In another embodiment, the light-chain variable domain comprises a sequence of amino acids that is at least 70%, 75%, 80%, 85%, 90%, 95%, 96%, 97%, 98%, or 99% identical to the sequence of alight chain variable domain selected from the group consisting of L1-L28. In another embodiment, the light chain variable domain comprises a sequence of amino acids that is encoded by a nucleotide sequence that is at least 70%, 75%, 80%, 85%, 90%, 95%, 96%, 97%, 98%, or 99% identical to a nucleotide sequence that encodes a light chain variable domain selected from the group consisting of L1-L28 (which includes L1, L2, L3, L4, L5, L6, L7, L8, L9, L10, L11, L12, L13, L14, . . . and L28). In another embodiment, the light chain variable domain comprises a sequence of amino acids that is encoded by a polynucleotide that hybridizes under moderately stringent conditions to the complement of a polynucleotide that encodes a light chain variable domain selected from the group consisting of L1-L28. In another embodiment, the light chain variable domain comprises a sequence of amino acids that is encoded by a polynucleotide that hybridizes under moderately stringent conditions to the complement of a polynucleotide that encodes a light chain variable domain selected from the group consisting of L1-L28. In another embodiment, the light chain variable domain comprises a sequence of amino acids that is encoded by a polynucleotide that hybridizes under moderately stringent conditions to a complement of a light chain polynucleotide of L1-L28.

[0223] In one embodiment, the present disclosure provides an antigen binding protein comprising a light chain variable domain comprising a sequence of amino acids that differs from the sequence of a light chain variable domain encoded by one of the clones of the library of CTLA-4 binding clones, deposited under ATCC Accession NO. PTA-125512, only at 15, 14, 13, 12, 11, 10, 9, 8, 7, 6, 5, 4, 3, 2, or 1 residues, wherein each such sequence difference is independently either a deletion, insertion, or substitution of one amino acid residue. In another embodiment, the light-chain variable domain comprises a sequence of amino acids that is at least 70%, 75%, 80%, 85%, 90%, 95%, 96%, 97%, 98%, or 99% identical to the sequence of a light chain variable domain encoded by one of the clones of the library of CTLA-4 binding clones, deposited under ATCC Accession NO. PTA-125512. In another embodiment, the light chain variable domain comprises a sequence of amino acids that is encoded by a nucleotide sequence that is at least 70%, 75%, 80%, 85%, 90%, 95%, 96%, 97%, 98%, or 99% identical to a nucleotide sequence of one of the clones of the library of CTLA-4 binding clones, deposited under ATCC Accession NO. PTA-125512.

[0224] In another embodiment, the present disclosure provides an antigen binding protein comprising a heavy chain variable domain comprising a sequence of amino acids that differs from the sequence of a heavy chain variable domain selected from the group consisting of H1-H28 only at 15, 14, 13, 12, 11, 10, 9, 8, 7, 6, 5, 4, 3, 2, or 1 residue(s), wherein each such sequence difference is independently either a deletion, insertion, or substitution of one amino acid residue. In another embodiment, the heavy chain variable domain comprises a sequence of amino acids that is at least 70%, 75%, 80%, 85%, 90%, 95%, 96%, 97%, 98%, or 99% identical to the sequence of a heavy chain variable domain selected from the group consisting of H1-H28. In another embodiment, the heavy chain variable domain comprises a sequence of amino acids that is encoded by a nucleotide sequence that is at least 70%, 75%, 80%, 85%, 90%, 95%, 96%, 97%, 98%, or 99% identical to a nucleotide sequence that encodes a heavy chain variable domain selected from the group consisting of H1-H28. In another embodiment, the heavy chain variable domain comprises a sequence of amino acids that is encoded by a polynucleotide that hybridizes under moderately stringent conditions to the complement of a polynucleotide that encodes a heavy chain variable domain selected from the group consisting of H1-H28. In another embodiment, the heavy chain variable domain comprises a sequence of amino acids that is encoded by a polynucleotide that hybridizes under moderately stringent conditions to the complement of a polynucleotide that encodes a heavy chain variable domain selected from the group consisting of H1-H28. In another embodiment, the heavy chain variable domain comprises a sequence of amino acids that is encoded by a polynucleotide that hybridizes under moderately stringent conditions to a complement of a heavy chain polynucleotide disclosed herein.

[0225] In one embodiment, the present disclosure provides an antigen binding protein comprising a heavy chain variable domain comprising a sequence of amino acids that differs from the sequence of a heavy chain variable domain encoded by one of the clones of the library of CTLA-4 binding clones, deposited under ATCC Accession NO. PTA-125512, only at 15, 14, 13, 12, 11, 10, 9, 8, 7, 6, 5, 4, 3, 2, or 1 residues, wherein each such sequence difference is independently either a deletion, insertion, or substitution of one amino acid residue. In another embodiment, the heavy chain variable domain comprises a sequence of amino acids that is at least 70%, 75%, 80%, 85%, 90%, 95%, 96%, 97%, 98%, or 99% identical to the sequence of a heavy chain variable domain encoded by one of the clones of the library of CTLA-4 binding clones, deposited under ATCC Accession NO. PTA-125512. In another embodiment, the heavy chain variable domain comprises a sequence of amino acids that is encoded by a nucleotide sequence that is at least 70%, 75%, 80%, 85%, 90%, 95%, 96%, 97%, 98%, or 99% identical to a nucleotide sequence of one of the clones of the library of CTLA-4 binding clones, deposited under ATCC Accession NO. PTA-125512.

[0226] Particular embodiments of antigen binding proteins of the present disclosure comprise one or more amino acid sequences that are identical to the amino acid sequences of one or more of the CDRs and/or FRs referenced herein. In one embodiment, the antigen binding protein comprises a light chain CDR1 sequence illustrated above. In another embodiment, the antigen binding protein comprises a light chain CDR2 sequence illustrated above. In another embodiment, the antigen binding protein comprises a light chain CDR3 sequence illustrated above. In another embodiment, the antigen binding protein comprises a heavy chain CDR1 sequence illustrated above. In another embodiment, the antigen binding protein comprises a heavy chain CDR2 sequence illustrated above. In another embodiment, the antigen binding protein comprises a heavy chain CDR3 sequence illustrated above.

[0227] In one embodiment, the present disclosure provides an antigen binding protein that comprises one or more CDR sequences that differ from a CDR sequence shown above by no more than 5, 4, 3, 2, or 1 amino acid residues.

[0228] In some embodiments, at least one of the antigen binding protein's CDR1 sequences is a CDR1 sequence from A1-A28, CDR1-L1 to 28, or CDR1-H1 to 28 as shown in TABLE 5. In some embodiments, at least one of the antigen binding protein's CDR2 sequences is a CDR2 sequence from A1-A28, CDR2-L1 to 28, or CDR2-H1 to 28 as shown in TABLE 5. In some embodiments, at least one of the antigen binding protein's CDR3 sequences is a CDR3 sequence from A1-A28, CDR3-L1 to 28, or CDR3-H1 to 28 as shown in TABLE 5.

[0229] In another embodiment, the antigen binding protein's light chain CDR3 sequence is alight chain CDR3 sequence from A1-A28 or CDR3-L1 to 28, as shown in TABLE 5, and the antigen binding protein's heavy chain CDR3 sequence is a heavy chain sequence from A1-A28 or CDR-H1 to 28, as shown in TABLE 5.

[0230] In some embodiments, at least one of the antigen binding protein's CDR1 sequences is a light chain CDR1 sequence of QSVSSSYLA (SEQ ID NO: 12078 or 1014). In some embodiments, at least one of the antigen binding protein's CDR2 sequences is a light chain CDR2 sequence of GASSRAT (SEQ ID NO: 12079 or 2014). In some embodiments, at least one of the antigen binding protein's CDR3 sequences is a light chain CDR3 sequence of QQYGSSPWT (SEQ ID NO: 12080 or 3014).

[0231] In some embodiments, at least one of the antigen binding protein's CDR1 sequences is a heavy chain CDR1 sequence of GFTFSSY (SEQ ID NO: 12075 or 4014). In some embodiments, at least one of the antigen binding protein's CDR2 sequences is a heavy chain CDR2 sequence of WYEGRN (SEQ ID NO: 12076 or 5014). In some embodiments, at least one of the antigen binding protein's CDR3 sequences is a heavy chain CDR3 sequence of AGDLGAFDI (SEQ ID NO: 12077 or 6014).

[0232] In some embodiments, the ABP comprises a CDR1-L consisting of SEQ ID NO: 12004, a CDR2-L consisting of SEQ ID NO: 12014, a CDR3-L consisting of SEQ ID NO: 12024, a CDR1-H consisting of SEQ ID NO: 12039, a CDR2-H consisting of SEQ ID NO: 12049, and a CDR3-H consisting of SEQ ID NO: 12059. In some embodiments, the ABP comprises a CDR1-L consisting of SEQ ID NO: 12005, a CDR2-L consisting of SEQ ID NO: 12015, a CDR3-L consisting of SEQ ID NO: 12025, a CDR1-H consisting of SEQ ID NO: 12040, a CDR2-H consisting of SEQ ID NO: 12050, and a CDR3-H consisting of SEQ ID NO: 12060. In some embodiments, the ABP comprises a CDR1-L consisting of SEQ ID NO: 12006, a CDR2-L consisting of SEQ ID NO: 12016, a CDR3-L consisting of SEQ ID NO: 12026, a CDR1-H consisting of SEQ ID NO: 12041, a CDR2-H consisting of SEQ ID NO: 12051, and a CDR3-H consisting of SEQ ID NO: 12061, In some embodiments, the ABP comprises a CDR1-L consisting of SEQ ID NO: 12007, a CDR2-L consisting of SEQ ID NO: 12017, a CDR3-L consisting of SEQ ID NO: 12027, a CDR1-H consisting of SEQ ID NO: 12042, a CDR2-H consisting of SEQ ID NO: 12052, and a CDR3-H consisting of SEQ ID NO: 12062. In some embodiments, the ABP comprises a CDR1-L consisting of SEQ ID NO: 12008, a CDR2-L consisting of SEQ ID NO: 12018, a CDR3-L consisting of SEQ ID NO: 12028, a CDR1-H consisting of SEQ ID NO: 12043, a CDR2-H consisting of SEQ ID NO: 12053, and a CDR3-H consisting of SEQ ID NO: 12063.

[0233] In another embodiment, the antigen binding protein comprises 1, 2, 3, 4, or 5 CDR sequence(s) that each independently differs by 6, 5, 4, 3, 2, 1, or 0 single amino acid additions, substitutions, and/or deletions from a CDR sequence of A1-A23, and the antigen binding protein further comprises 1, 2, 3, 4, or 5 CDR sequence(s) that each independently differs by 6, 5, 4, 3, 2, 1, or 0 single amino acid additions, substitutions, and/or deletions from a CDR sequence. In some embodiments, the antigen binding protein comprises 1, 2, 3, 4, or 5 CDR sequence(s) that each has at least 50%, 55%, 60%, 65%, 70%, 75%, 80%, 85%, 90%, 95%, 96%, 97%, 98%, or 99% sequence identity to a CDR sequence of A1-A28.

[0234] The nucleotide sequences of A1-A28, or the amino acid sequences of A1-A28, can be altered, for example, by random mutagenesis or by site-directed mutagenesis (e.g., oligonucleotide-directed site-specific mutagenesis) to create an altered polynucleotide comprising one or more particular nucleotide substitutions, deletions, or insertions as compared to the non-mutated polynucleotide. Examples of techniques for making such alterations are described in Walder et al., 1986, Gene 42:133; Bauer et al. 1985, Gene 37:73; Craik, BioTechniques, January 1985, 12-19; Smith et al., 1981, Genetic Engineering: Principles and Methods, Plenum Press; and U.S. Pat. Nos. 4,518,584 and 4,737,462. These and other methods can be used to make, for example, derivatives of anti-CTLA-4 antibodies that have a desired property, for example, increased affinity, avidity, or specificity for CTLA-4, increased activity or stability in vivo or in vitro, or reduced in vivo side-effects as compared to the underivatized antibody.

[0235] Other derivatives of anti-CTLA-4 antibodies within the scope of this disclosure include covalent or aggregative conjugates of anti-CTLA-4 antibodies, or fragments thereof, with other proteins or polypeptides, such as by expression of recombinant fusion proteins comprising heterologous polypeptides fused to the N-terminus or C-terminus of an anti-CTLA-4 antibody polypeptide. For example, the conjugated peptide may be a heterologous signal (or leader) polypeptide, e.g., the yeast alpha-factor leader, or a peptide such as an epitope tag. Antigen binding protein-containing fusion proteins can comprise peptides added to facilitate purification or identification of antigen binding protein (e.g., poly-His). An antigen binding protein also can be linked to the FLAG peptide Asp-Tyr-Lys-Asp-Asp-Asp-Asp-Lys (DYKDDDDK) (SEQ ID NO: 7002) as described in Hopp et al., Bio/Technology 6:1204, 1988, and U.S. Pat. No. 5,011,912. The FLAG peptide is highly antigenic and provides an epitope reversibly bound by a specific monoclonal antibody (mAb), enabling rapid assay and facile purification of expressed recombinant protein. Reagents useful for preparing fusion proteins in which the FLAG peptide is fused to a given polypeptide are commercially available (Sigma, St. Louis, Mo.).

[0236] One suitable Fc polypeptide, described in PCT application WO 93/10151 (hereby incorporated by reference), is a single chain polypeptide extending from the N-terminal hinge region to the native C-terminus of the Fc region of a human IgG1 antibody. Another useful Fc polypeptide is the Fc mutein described in U.S. Pat. No. 5,457,035 and in Baum et al., 1994, EMBO J. 13:3992-4001. The amino acid sequence of this mutein is identical to that of the native Fc sequence presented in WO 93/10151, except that amino acid 19 has been changed from Leu to Ala, amino acid 20 has been changed from Leu to Glu, and amino acid 22 has been changed from Gly to Ala. The mutein exhibits reduced affinity for Fc receptors.

[0237] In other embodiments, the variable portion of the heavy and/or light chains of an anti-CTLA-4 antibody may be substituted for the variable portion of an antibody heavy and/or light chain.

[0238] Oligomers that contain one or more antigen binding proteins may be employed as CTLA-4 antagonists or agonists. Oligomers may be in the form of covalently-linked or non-covalently-linked dimers, trimers, or higher oligomers. Oligomers comprising two or more antigen binding protein are contemplated for use, with one example being a homodimer. Other oligomers include heterodimers, homotrimers, heterotrimers, homotetramers, heterotetramers, etc.

[0239] One embodiment is directed to oligomers comprising multiple antigen binding proteins joined via covalent or non-covalent interactions between peptide moieties fused to the antigen binding proteins. Such peptides may be peptide linkers (spacers), or peptides that have the property of promoting oligomerization. Leucine zippers and certain polypeptides derived from antibodies are among the peptides that can promote oligomerization of antigen binding proteins attached thereto, as described in more detail below.

[0240] In particular embodiments, the oligomers comprise from two to four antigen binding proteins. The antigen binding proteins of the oligomer may be in any form, such as any of the forms described above, e.g., variants or fragments. Preferably, the oligomers comprise antigen binding proteins that have CTLA-4 binding activity.

[0241] In one embodiment, an oligomer is prepared using polypeptides derived from immunoglobulins. Preparation of fusion proteins comprising certain heterologous polypeptides fused to various portions of antibody-derived polypeptides (including the Fe domain) has been described, e.g., by Ashkenazi et al., 1991, PNAS USA 88:10535; Byrn et al., 1990, Nature 344:677; and Hollenbaugh et al., 1992 Curr. Prots in Immunol., Suppl. 4, pages 10.19.1-10.19.11.

[0242] One embodiment of the present disclosure is directed to a dimer comprising two fusion proteins created by fusing a CTLA-4 binding fragment of an anti-CTLA-4 antibody to the Fc region of an antibody. The dimer can be made by, for example, inserting a gene fusion encoding the fusion protein into an appropriate expression vector, expressing the gene fusion in host cells transformed with the recombinant expression vector, and allowing the expressed fusion protein to assemble much like antibody molecules, whereupon interchain disulfide bonds form between the Fc moieties to yield the dimer.

[0243] Alternatively, the oligomer is a fusion protein comprising multiple antigen binding proteins, with or without peptide linkers (spacer peptides). Among the suitable peptide linkers are those described in U.S. Pat. Nos. 4,751,180 and 4,935,233.

[0244] Another method for preparing oligomeric antigen binding proteins involves use of a leucine zipper. Leucine zipper domains are peptides that promote oligomerization of the proteins in which they are found. Leucine zippers were originally identified in several DNA-binding proteins (Landschulz et al., 1988, Science 240:1759), and have since been found in a variety of different proteins. Among the known leucine zippers are naturally occurring peptides and derivatives thereof that dimerize or trimerize. Examples of leucine zipper domains suitable for producing soluble oligomeric proteins are described in PCT application WO 94/10308, and the leucine zipper derived from lung surfactant protein D (SPD) described in Hoppe et al., 1994, FEBS Letters 344:191, hereby incorporated by reference. The use of a modified leucine zipper that allows for stable trimerization of a heterologous protein fused thereto is described in Fanslow et al., 1994, Semin. Immunol. 6:267-78. In one approach, recombinant fusion proteins comprising an anti-CTLA-4 antibody fragment or derivative fused to a leucine zipper peptide are expressed in suitable host cells, and the soluble oligomeric anti-CTLA-4 antibody fragments or derivatives that form are recovered from the culture supernatant.

[0245] In one aspect, the present disclosure provides antigen binding proteins that interfere with the binding of CTLA-4 to its ligands. Such antigen binding proteins can be made against CTLA-4, or a fragment, variant or derivative thereof, and screened in conventional assays for the ability to interfere with binding of CTLA-4 to its ligands. Examples of suitable assays are assays that test the antigen binding proteins for the ability to inhibit binding of CTLA-4 ligands to cells expressing CTLA-4, or that test antigen binding proteins for the ability to reduce a biological or cellular response that results from the binding of CTLA-4 ligands to cell surface CTLA-4. For example, antibodies can be screened according to their ability to bind to immobilized antibody surfaces (CTLA-4). Antigen binding proteins that block the binding of CTLA-4 to a ligand can be employed in treating any CTLA-4-related condition, including but not limited to cancer. In an embodiment, a human anti-CTLA-4 monoclonal antibody generated by procedures involving immunization of transgenic mice is employed in treating such conditions.

[0246] Antigen-binding fragments of antigen binding proteins of the present disclosure can be produced by conventional techniques. Examples of such fragments include, but are not limited to, Fab and F(ab′)₂ fragments. Antibody fragments and derivatives produced by genetic engineering techniques also are contemplated.

[0247] Additional embodiments include chimeric antibodies, e.g., humanized versions of non-human (e.g., murine) monoclonal antibodies. Such humanized antibodies may be prepared by known techniques, and offer the advantage of reduced immunogenicity when the antibodies are administered to humans. In one embodiment, a humanized monoclonal antibody comprises the variable domain of a murine antibody (or all or part of the antigen binding site thereof) and a constant domain derived from a human antibody. Alternatively, a humanized antibody fragment may comprise the antigen binding site of a murine monoclonal antibody and a variable domain fragment (lacking the antigen-binding site) derived from a human antibody. Procedures for the production of chimeric and further engineered monoclonal antibodies include those described in Riechmann et al., 1988, Nature 332:323, Liu et al., 1987, Proc. Nat. Acad. Sci. USA 84:3439, Larrick et al., 1989, Bio/Technology 7:934, and Winter et al., 1993, TIPS 14:139. In one embodiment, the chimeric antibody is a CDR grafted antibody. Techniques for humanizing antibodies are discussed in, e.g., U.S. Pat. Nos. 5,869,619, 5,225,539, 5,821,337, 5,859,205, 6,881,557, Padlan et al., 1995, FASEB J. 9:133-39, and Tamura et al., 2000, J. Immunol. 164:1432-41.

[0248] Procedures have been developed for generating human or partially human antibodies in non-human animals. For example, mice in which one or more endogenous immunoglobulin genes have been inactivated by various means have been prepared. Human immunoglobulin genes have been introduced into the mice to replace the inactivated mouse genes. Antibodies produced in the animal incorporate human immunoglobulin polypeptide chains encoded by the human genetic material introduced into the animal. In one embodiment, a non-human animal, such as a transgenic mouse, is immunized with a CTLA-4 polypeptide, such that antibodies directed against the CTLA-4 polypeptide are generated in the animal.

[0249] One example of a suitable immunogen is a soluble human CTLA-4, such as a polypeptide comprising the extracellular domain of the protein having the following sequence: SEQ ID: 7001 or other immunogenic fragment of the protein. Examples of techniques for production and use of transgenic animals for the production of human or partially human antibodies are described in U.S. Pat. Nos. 5,814,318, 5,569,825, and 5,545,806, Davis et al., 2003, Production of human antibodies from transgenic mice in Lo, ed. Antibody Engineering: Methods and Protocols, Humana Press, NJ:191-200, Kellermann et al., 2002, Curr Opin Biotechnol. 13:593-97, Russel et al., 2000, Infect Immun. 68:1820-26, Gallo et al., 2000, Eur J. Immun. 30:534-40, Davis et al., 1999. Cancer Metastasis Rev. 18:421-25, Green, 1999, J. Immunol Methods. 231:11-23, Jakobovits, 1998, Advanced Drug Delivery Reviews 31:33-42, Green et al., 1998, J Exp Med. 188:483-95, Jakobovits A, 1998, Exp. Opin. Invest. Drugs. 7:607-14, Tsuda et al., 1997, Genomics. 42:413-21, Mendez et al., 1997, Nat Genet. 15:146-56, Jakobovits, 1994, Curr Biol. 4:761-63, Arbones et al., 1994, Immunity. 1:247-60, Green et al., 1994, Nat Genet. 7:13-21, Jakobovits et al., 1993, Nature. 362:255-58, Jakobovits et al., 1993, Proc Natl Acad Sci USA. 90:2551-55. Chen, J., M. Trounstine, F. W. Alt, F. Young, C. Kurahara, J. Loring, D. Huszar. Inter'l Immunol. 5 (1993): 647-656, Choi et al., 1993, Nature Genetics 4: 117-23, Fishwild et al., 1996, Nature Biotech. 14: 845-51, Harding et al., 1995, Annals of the New York Academy of Sciences, Lonberg et al., 1994, Nature 368: 856-59, Lonberg, 1994, Transgenic Approaches to Human Monoclonal Antibodies in Handbook of Experimental Pharmacology 113: 49-101, Lonberg et al., 1995, Internal Review of Immunology 13: 65-93, Neuberger, 1996, Nature Biotechnology 14: 826, Taylor et al., 1992, Nucleic Acids Res. 20: 6287-95, Taylor et al., 1994, Inter'l Immunol. 6: 579-91, Tomizuka et al., 1997, Nature Genetics 16: 133-43, Tomizuka et al., 2000, Pro. Nat'l Acad. Sci. USA 97: 722-27, Tuaillon et al., 1993, Pro. Nat'l Acad. Sci. USA 90: 3720-24, and Tuaillon et al., 1994, J. Immunol. 152: 2912-20.

[0250] Antigen binding proteins (e.g., antibodies, antibody fragments, and antibody derivatives) of the present disclosure can comprise any constant region known in the art. The light chain constant region can be, for example, a kappa- or lambda-type light chain constant region, e.g., a human kappa- or lambda-type light chain constant region. The heavy chain constant region can be, for example, an alpha-, delta-, epsilon-, gamma-, or mu-type heavy chain constant regions, e.g., a human alpha-, delta-, epsilon-, gamma-, or mu-type heavy chain constant region. In one embodiment, the light or heavy chain constant region is a fragment, derivative, variant, or mutein of a naturally occurring constant region.

[0251] Techniques are known for deriving an antibody of a different subclass or isotype from an antibody of interest, i.e., subclass switching. Thus, IgG antibodies may be derived from an IgM antibody, for example, and vice versa. Such techniques allow the preparation of new antibodies that possess the antigen-binding properties of a given antibody (the parent antibody), but also exhibit biological properties associated with an antibody isotype or subclass different from that of the parent antibody. Recombinant DNA techniques may be employed. Cloned DNA encoding particular antibody polypeptides may be employed in such procedures, e.g., DNA encoding the constant domain of an antibody of the desired isotype. See also Lantto et al., 2002, Methods Mol. Biol. 178:303-16.

[0252] In one embodiment, an antigen binding protein of the present disclosure comprises the IgG1 heavy chain domain of any of A1-A28 (H1-H28) or a fragment of the IgG1 heavy chain domain of any of A1-A28 (H1-H28). In another embodiment, an antigen binding protein of the present disclosure comprises the kappa light chain constant chain region of A1-A28 (L1-L28), or a fragment of the kappa light chain constant region of A1-A28 (L1-L28). In another embodiment, an antigen binding protein of the present disclosure comprises both the IgG1 heavy chain domain, or a fragment thereof, of A1-A28 (H1-H28) and the kappa light chain domain, or a fragment thereof, of A1-A28 (L1-L28).

[0253] In another embodiment, an antigen binding protein of the present disclosure comprises both the IgG1 heavy chain domain or a fragment thereof, of A1-A28 (H1-H28). In some embodiments, the IgG1 heavy chain domain comprises a lysine at amino acid position 97 (K97) according to IMGT exon numbering system. In another embodiment, the IgG1 heavy chain domain comprises a lysine at amino acid position 214 (K214) according to EU numbering system. In some embodiments, the IgG1 heavy chain domain comprises an Arginine at amino acid position 97 (R97) according to IMGT exon numbering system. In another embodiment, the IgG1 heavy chain domain comprises an Arginine at amino acid position 214 (R214) according to EU numbering system.

[0254] In some embodiments, the antigen binding protein of the present disclosure comprises the IgG1 heavy chain domain of A14 (H14) (SEQ ID NO: 114) or a fragment of the IgG1 heavy chain domain, and the IgG1 light chain domain of A14 (H14) (SEQ ID NO: 14) or fragment of the IgG1 light chain domain.

[0255] Accordingly, the antigen binding proteins of the present disclosure include those comprising, for example, the variable domain combinations L1H1, L2H2, L3H3, L4H4, L5H5, L6H6, L7H7, L8H8, L9H9, L10H10, L11H11, L12H12, L13H13, . . . and L28H28, having a desired isotype (for example, IgA, IgG1, IgG2, IgG3, IgG4, IgM, IgE, and IgD) as well as Fab or F(ab′)₂ fragments thereof. Moreover, if an IgG4 is desired, it may also be desired to introduce a point mutation (CPSCP (SEQ ID NO: 11969)->CPPCP (SEQ ID NO: 11970)) in the hinge region as described in Bloom et al., 1997, Protein Science 6:407, incorporated by reference herein) to alleviate a tendency to form intra-H chain disulfide bonds that can lead to heterogeneity in the IgG4 antibodies.

[0256] In one embodiment, the antigen binding protein has a K_{off} of 1×10⁻⁴ s⁻¹ or lower. In another embodiment, the K_{off} is 5×10⁻⁵ s⁻¹ or lower. In another embodiment, the K_{off} is substantially the same as an antibody having a combination of light chain and heavy chain variable domain sequences selected from the group of combinations consisting of L1H1, L2H2, L3H3, L4H4, L5H5, L6H6, . . . and L28H28. In another embodiment, the antigen binding protein binds to CTLA-4 with substantially the same K_{off} as an antibody that comprises one or more CDRs from an antibody having a combination of light chain and heavy chain variable domain sequences selected from the group of combinations consisting of L1H1, L2H2, L3H3, L4H4, L5H5, L6H6, . . . and L23H28. In another embodiment, the antigen binding protein binds to CTLA-4 with substantially the same K_{off} as an antibody that comprises one of the amino acid sequences illustrated above. In another embodiment, the antigen binding protein binds to CTLA-4 with substantially the same K_{off} as an antibody that comprises one or more CDRs from an antibody that comprises one of the amino acid sequences illustrated above.

[0257] In one aspect, the present disclosure provides antigen-binding fragments of an anti-CTLA-4 antibody of the present disclosure. Such fragments can consist entirely of antibody-derived sequences or can comprise additional sequences. Examples of antigen-binding fragments include Fab, F(ab′)2, single chain antibodies, diabodies, triabodies, tetrabodies, and domain antibodies. Other examples are provided in Lunde et al., 2002, Biochem. Soc. Trans. 30:500-06.

[0258] Single chain antibodies (scFv) may be formed by linking heavy and light chain variable domain (Fv region) fragments via an amino acid bridge (short peptide linker, e.g., a synthetic sequence of amino acid residues), resulting in a single polypeptide chain. Such single-chain Fvs (scFvs) have been prepared by fusing DNA encoding a peptide linker between DNAs encoding the two variable domain polypeptides (V_{L} and V_{H}). The resulting polypeptides can fold back on themselves to form antigen-binding monomers, or they can form multimers (e.g., dimers, trimers, or tetramers), depending on the length of a flexible linker between the two variable domains (Kortt et al., 1997, Prot. Eng. 10:423; Kortt et al., 2001, Biomol. Eng. 18:95-108, Bird et al., 1988, Science 242:423-26 and Huston et al., 1988, Proc. Natl. Acad. Sci. USA 85:5879-83). By combining different V_{L} and V_{H}-comprising polypeptides, one can form multimeric scFvs that bind to different epitopes (Kriangkum et al., 2001, Biomol. Eng. 18:31-40). Techniques developed for the production of single chain antibodies include those described in U.S. Pat. No. 4,946,778; Bird, 1988, Science 242:423; Huston et al., 1988, Proc. Natl. Acad. Sci. USA 85:5879; Ward et al., 1989, Nature 334:544, de Graaf et al., 2002, Methods Mol Biol. 178:379-87. ScFvs comprising the variable domain combinations L1H1, L2H2, L3H3, L4H4, L5H5, L6H6, . . . , and L28H28 are encompassed by the present disclosure.

[0259] ABPs provided herein can be anti-CTLA-4 antibodies purified from host cells that have been transfected by a gene encoding the antibodies by elution of filtered supernatant of host cell culture fluid using a Heparin HP column, using a salt gradient.

[0260] In some embodiments, the host cell is used in adoptive cell therapy for delivery of the ABP to the subject. In some embodiments, the methods described herein can administer the host cell that has been transfected by a gene encoding the anti-CTLA-4 antibodies.

[0261] An antigen binding protein can have, for example, the structure of a naturally occurring immunoglobulin. An “immunoglobulin” is a tetrameric molecule. In a naturally occurring immunoglobulin, each tetramer is composed of two identical pairs of polypeptide chains, each pair having one “light” (about 25 kDa) and one “heavy” chain (about 50-70 kDa). The amino-terminal portion of each chain includes a variable region of about 100 to 110 or more amino acids primarily responsible for antigen recognition. The carboxy-terminal portion of each chain defines a constant region primarily responsible for effector function. Human light chains are classified as kappa and lambda light chains. Heavy chains are classified as mu, delta, gamma, alpha, or epsilon, and define the antibody's isotype as IgM, IgD, IgG, IgA, and IgE, respectively. Within light and heavy chains, the variable and constant regions are joined by a “J” region of about 12 or more amino acids, with the heavy chain also including a “D” region of about 10 more amino acids. See generally, Fundamental Immunology Ch. 7 (Paul, W., ed., 2nd ed. Raven Press, N.Y. (1989)) (incorporated by reference in its entirety for all purposes). The variable regions of each light/heavy chain pair form the antibody binding site such that an intact immunoglobulin has two binding sites.

[0262] In one aspect, the present disclosure provides an ABP comprising a human heavy chain constant region gene segment of an IGHG1*01. In some embodiments, the IGHG1*01 Fc antibody comprises an scFv. In some embodiments, the ABP is specific to CTLA-4, PD-1, PD-L1, LAG-3, CD47, TIGIT, or other antigens. In some embodiments, the ABP is specific to CTLA-4. In some embodiments, the ABP comprises an antigen binding domain of an antibody therapeutic approved or in regulatory review. In some embodiments, the ABP comprises an antigen binding domain of Ipilimumab, Toripalimab. Amivantamab. Dostarlimab, Cemiplimab, Durvalumab, Atezolizumab, or Pembrolizumab.

[0263] In some embodiments, the ABP has an enhanced FcR signaling or Fc effector function by comprising a human heavy chain constant region gene segment an IGHG1*01. Accordingly, the present disclosure further provides a method of inducing FcR-mediated Treg depletion in the tumor microenvironment, comprising the step of administering the ABP comprising a human heavy chain constant region gene segment of an IGHG1*01. The present disclosure also provides a method of improving FcR signaling or Fc effector function of an ABP by introducing a human heavy chain constant region gene segment of an IGHG1*01 to the ABP.

[0264] In one aspect, antigen binding proteins in accordance with the present disclosure include antigen binding proteins that inhibit a biological activity of CTLA-4.

[0265] In some embodiments, the antigen binding proteins in accordance with the present disclosure include an IGHG1*01 Fe anti-CTLA-4 antibody or antigen-binding fragment thereof that enhances FcR signaling or Fc effector function. In some embodiments, the IGHG1*01 Fc anti-CTLA-4 antibody comprises an scFvs.

[0266] Different antigen binding proteins may bind to different domains of CTLA-4 or act by different mechanisms of action. As indicated herein inter alia, the domain region is designated such as to be inclusive of the group, unless otherwise indicated. For example, amino acids 4-12 refers to nine amino acids: amino acids at positions 4, and 12, as well as the seven intervening amino acids in the sequence. Other examples include antigen binding proteins that inhibit binding of CTLA-4 to its ligands. An antigen binding protein need not completely inhibit a CTLA-4-induced activity to find use in the present disclosure; rather, antigen binding proteins that reduce a particular activity of CTLA-4 are contemplated for use as well. (Discussions herein of particular mechanisms of action for CTLA-4-binding antigen binding proteins in treating particular diseases are illustrative only, and the methods presented herein are not bound thereby.)

[0267] A Fab fragment is a monovalent fragment having the V_{L}, V_{H}, C_{L} and C_{H1} domains; a F(ab′)₂ fragment is a bivalent fragment having two Fab fragments linked by a disulfide bridge at the hinge region; a Fd fragment has the V_{H} and C_{H1} domains; an Fv fragment has the V_{L} and V_{H} domains of a single arm of an antibody; and a dAb fragment has a V_{H} domain, a V_{L} domain, or an antigen-binding fragment of a V_{H} or V_{L} domain (U.S. Pat. Nos. 6,846,634, 6,696,245, US App. Pub. No. 05/0202512, 04/0202995, 04/0038291, 04/0009507, 03/0039958, Ward et al., Nature 341:544-546, 1989).

[0268] Polynucleotide and polypeptide sequences of particular light and heavy chain variable domains are described below. Antibodies comprising a light chain and heavy chain are designated by combining the name of the light chain and the name of the heavy chain variable domains. For example, “L4H7,” indicates an antibody comprising the light chain variable domain of L4 (comprising a sequence of SEQ ID NO:4) and the heavy chain variable domain of H7 (comprising a sequence of SEQ ID NO:107). Light chain variable sequences are provided in SEQ ID Nos: 1-28, and heavy chain variable sequences are provided in SEQ ID Nos:101-128.

[0269] In other embodiments, an antibody may comprise a specific heavy or light chain, while the complementary light or heavy chain variable domain remains unspecified. In particular, certain embodiments herein include antibodies that bind a specific antigen (such as CTLA-4) by way of a specific light or heavy chain, such that the complementary heavy or light chain may be promiscuous, or even irrelevant, but may be determined by, for example, screening combinatorial libraries. Portolano et al., J. Immunol. V. 150 (3), pp. 880-887 (1993); Clackson et al., Nature v. 352 pp. 624-628 (1991); Adler et al., A natively paired antibody library yields drug leads with higher sensitivity and specificity than a randomly paired antibody library, MAbs (2018)); Adler et al., Rare, high-affinity mouse anti-CTLA-4 antibodies that function in checkpoint blockade, discovered using microfluidics and molecular genomics, MAbs (2017).

[0270] Naturally occurring immunoglobulin chains exhibit the same general structure of relatively conserved framework regions (FR) joined by three hypervariable regions, also called complementarity determining regions or CDRs. From N-terminus to C-terminus, both light and heavy chains comprise the domains FR1, CDR1, FR2, CDR2, FR3, CDR3 and FR4. The assignment of amino acids to each domain is in accordance with the definitions of Kabat et al. in Sequences of Proteins of Immunological Interest, 5th Ed., US Dept. of Health and Human Services, PHS, NIH, NIH Publication no. 91-3242, 1991.

[0271] The term “human antibody,” also referred to as “fully human antibody,” includes all antibodies that have one or more variable and constant regions derived from human immunoglobulin sequences. In one embodiment, all of the variable and constant domains are derived from human immunoglobulin sequences (a fully human antibody). These antibodies may be prepared in a variety of ways, examples of which are described below, including through the immunization with an antigen of interest of a mouse that is genetically modified to express antibodies derived from human heavy and/or light chain-encoding genes.

[0272] A humanized antibody has a sequence that differs from the sequence of an antibody derived from a non-human species by one or more amino acid substitutions, deletions, and/or additions, such that the humanized antibody is less likely to induce an immune response, and/or induces a less severe immune response, as compared to the non-human species antibody, when it is administered to a human subject. In one embodiment, certain amino acids in the framework and constant domains of the heavy and/or light chains of the non-human species antibody are mutated to produce the humanized antibody. In another embodiment, the constant domain(s) from a human antibody are fused to the variable domain(s) of a non-human species. In another embodiment, one or more amino acid residues in one or more CDR sequences of a non-human antibody are changed to reduce the likely immunogenicity of the non-human antibody when it is administered to a human subject, wherein the changed amino acid residues either are not critical for immunospecific binding of the antibody to its antigen, or the changes to the amino acid sequence that are made are conservative changes, such that the binding of the humanized antibody to the antigen is not significantly worse than the binding of the non-human antibody to the antigen. Examples of how to make humanized antibodies may be found in U.S. Pat. Nos. 6,054,297, 5,886,152 and 5,877,293.

[0273] The term “chimeric antibody” refers to an antibody that contains one or more regions from one antibody and one or more regions from one or more other antibodies. In one embodiment, one or more of the CDRs are derived from a human anti-CTLA-4 antibody. In another embodiment, all of the CDRs are derived from a human anti-CTL A-4 antibody. In another embodiment, the CDRs from more than one human anti-CTLA-4 antibodies are mixed and matched in a chimeric antibody. For instance, a chimeric antibody may comprise a CDR1 from the light chain of a first human anti-CTLA-4 antibody, a CDR2 and a CDR3 from the light chain of a second human anti-CTLA-4 antibody, and the CDRs from the heavy chain from a third anti-CTLA-4 antibody. Further, the framework regions may be derived from one of the same anti-CTLA-4 antibodies, from one or more different antibodies, such as a human antibody, or from a humanized antibody. In one example of a chimeric antibody, a portion of the heavy and/or light chain is identical with, homologous to, or derived from an antibody from a particular species or belonging to a particular antibody class or subclass, while the remainder of the chain(s) is/are identical with, homologous to, or derived from an antibody (-ies) from another species or belonging to another antibody class or subclass. Also included are fragments of such antibodies that exhibit the desired biological activity (i.e., the ability to specifically bind CTLA-4).

[0274] Fragments or analogs of antibodies can be readily prepared by those of ordinary skill in the art following the teachings of this specification and using techniques well-known in the art. Preferred amino- and carboxy-termini of fragments or analogs occur near boundaries of functional domains. Structural and functional domains can be identified by comparison of the nucleotide and/or amino acid sequence data to public or proprietary sequence databases. Computerized comparison methods can be used to identify sequence motifs or predicted protein conformation domains that occur in other proteins of known structure and/or function. Methods to identify protein sequences that fold into a known three-dimensional structure are known. See, e.g., Bowie et al., 1991, Science 253:164.

[0275] Antigen binding fragments derived from an antibody can be obtained, for example, by proteolytic hydrolysis of the antibody, for example, pepsin or papain digestion of whole antibodies according to conventional methods. By way of example, antibody fragments can be produced by enzymatic cleavage of antibodies with pepsin to provide a 5S fragment termed F(ab′)2. This fragment can be further cleaved using a thiol reducing agent to produce 3.5S Fab′ monovalent fragments. Optionally, the cleavage reaction can be performed using a blocking group for the sulfhydryl groups that result from cleavage of disulfide linkages. As an alternative, an enzymatic cleavage using papain produces two monovalent Fab fragments and an Fe fragment directly. These methods are described, for example, by Goldenberg, U.S. Pat. No. 4,331,647, Nisonoff et al., Arch. Biochem. Biophys. 89:230, 1960; Porter, Biochem. J. 73:119, 1959; Edelman et al., in Methods in Enzymology 1:422 (Academic Press 1967); and by Andrews, S. M. and Titus, J. A. in Current Protocols in Immunology (Coligan J. E., et al., eds), John Wiley & Sons, New York (2003), pages 2.8.1 2.8.10 and 2.10A.1 2.10A.5. Other methods for cleaving antibodies, such as separating heavy chains to form monovalent light heavy chain fragments (Fd), further cleaving of fragments, or other enzymatic, chemical, or genetic techniques may also be used, so long as the fragments bind to the antigen that is recognized by the intact antibody.

[0276] An antibody fragment may also be any synthetic or genetically engineered protein. For example, antibody fragments include isolated fragments consisting of the light chain variable region, “Fv” fragments consisting of the variable regions of the heavy and light chains, recombinant single chain polypeptide molecules in which light and heavy variable regions are connected by a peptide linker (scFv proteins).

[0277] Another form of an antibody fragment is a peptide comprising one or more complementarity determining regions (CDRs) of an antibody. CDRs (also termed “minimal recognition units”, or “hypervariable region”) can be incorporated into a molecule either covalently or noncovalently to make it an antigen binding protein. CDRs can be obtained by constructing polynucleotides that encode the CDR of interest. Such polynucleotides are prepared, for example, by using the polymerase chain reaction to synthesize the variable region using mRNA of antibody producing cells as a template (see, for example, Larrick et al., Methods: A Companion to Methods in Enzymology 2:106, 1991; Courtenay Luck, “Genetic Manipulation of Monoclonal Antibodies,” in Monoclonal Antibodies: Production, Engineering and Clinical Application, Ritter et al. (eds.), page 166 (Cambridge University Press 1995); and Ward et al., “Genetic Manipulation and Expression of Antibodies,” in Monoclonal Antibodies: Principles and Applications, Birch et al., (eds.), page 137 (Wiley Liss, Inc. 1995).

[0278] Thus, in one embodiment, the binding agent comprises at least one CDR as described herein. The binding agent may comprise at least two, three, four, five or six CDR's as described herein. The binding agent may further comprise at least one variable region domain of an antibody described herein. The variable region domain may be of any size or amino acid composition and will generally comprise at least one CDR sequence responsible for binding to human CTLA-4, for example CDR1-H, CDR2-H, CDR3-H, CDR1-L, CDR2-L, and CDR3-L, specifically described herein and which is adjacent to or in frame with one or more framework sequences. In general terms, the variable (V) region domain may be any suitable arrangement of immunoglobulin heavy (Vii) and/or light (V_{L}) chain variable domains. Thus, for example, the V region domain may be monomeric and be a Vii or V_{L} domain, which is capable of independently binding human CTLA-4 with an affinity at least equal to 1×10⁷M or less as described below. Alternatively, the V region domain may be dimeric and contain V_{H} V_{H}, V_{H} V_{L}, or V_{L} V_{L}, dimers. The V region dimer comprises at least one V_{H} and at least one V_{L} chain that may be non-covalently associated (hereinafter referred to as Fv). If desired, the chains may be covalently coupled either directly, for example via a disulfide bond between the two variable domains, or through a linker, for example a peptide linker, to form a single chain Fv (scFV).

[0279] The variable region domain may be any naturally occurring variable domain or an engineered version thereof. By engineered version is meant a variable region domain that has been created using recombinant DNA engineering techniques. Such engineered versions include those created, for example, from a specific antibody variable region by insertions, deletions, or changes in or to the amino acid sequences of the specific antibody. Particular examples include engineered variable region domains containing at least one CDR and optionally one or more framework amino acids from a first antibody and the remainder of the variable region domain from a second antibody.

[0280] The variable region domain may be covalently attached at a C terminal amino acid to at least one other antibody domain or a fragment thereof. Thus, for example, a V_{H} domain that is present in the variable region domain may be linked to an immunoglobulin CH1 domain, or a fragment thereof. Similarly a V_{L} domain may be linked to a CK domain or a fragment thereof. In this way, for example, the antibody may be a Fab fragment wherein the antigen binding domain contains associated V_{H} and V_{L} domains covalently linked at their C termini to a CH1 and CK domain, respectively. The CH1 domain may be extended with further amino acids, for example to provide a hinge region or a portion of a hinge region domain as found in a Fab′ fragment, or to provide further domains, such as antibody CH2 and CH3 domains.

[0281] In some embodiments, the ABP comprises an Fc region lacking a fucose sugar unit on the N glycan.

[0282] In some embodiments, the ABP comprises Glycine at the amino acid position 201.

[0283] In some embodiments, the ABP is produced from a cell comprising a bacterial protein RMD (GDP-6-deoxy-D-lyxo-4-hexulose reductase) or a modification thereof. In certain embodiments, the cell is cultured in the absence of fucose. In some embodiments, the ABP is produced from a cell lacking or reduced expression of Fut8. In some embodiments, the ABP is produced from a cell cultured in the presence of a fucosylation inhibitor, 2-Fluorfucose (2FF).

[0284] In some embodiments, the ABP is produced from a cell overexpressing glycosyltransferase (GnTIII). In some embodiments, the ABP is isolated based on its fucosylation status.

[0285] In some embodiments, the ABP is an afucosylated monoclonal antibody.

[0286] As described herein, antibodies comprise at least one of these CDRs. For example, one or more CDR may be incorporated into known antibody framework regions (IgG1, IgG2, etc.), or conjugated to a suitable vehicle to enhance the half-life thereof. Suitable vehicles include, but are not limited to Fc, polyethylene glycol (PEG), albumin, transferrin, and the like. These and other suitable vehicles are known in the art. Such conjugated CDR peptides may be in monomeric, dimeric, tetrameric, or other form. In one embodiment, one or more water-soluble polymer is bonded at one or more specific position, for example at the amino terminus, of a binding agent.

[0287] In another example, individual V_{L} or V_{H} chains from an antibody (i.e. CTLA-4 antibody) can be used to search for other V_{H} or V_{L} chains that could form antigen-binding fragments (or Fab), with the same specificity. Thus, random combinations of V_{H} and V_{L} chain Ig genes can be expressed as antigen-binding fragments in a bacteriophage library (such as fd or lambda phage). For instance, a combinatorial library may be generated by utilizing the parent V_{L} or V_{H} chain library combined with antigen-binding specific V_{L} or V_{H} chain libraries, respectively. The combinatorial libraries may then be screened by conventional techniques, for example by using radioactively labeled probe (such as radioactively labeled CTL A-4). See, for example, Portolano et al., J. Immunol. V. 150 (3) pp. 880-887 (1993).

[0288] Diabodies are bivalent antibodies comprising two polypeptide chains, wherein each polypeptide chain comprises V_{H} and V_{L} domains joined by a linker that is too short to allow for pairing between two domains on the same chain, thus allowing each domain to pair with a complementary domain on another polypeptide chain (see, e.g., Holliger et al., 1993, Proc. Natl. Acad. Sci. USA 90:6444-48, and Poljak et al., 1994, Structure 2:1121-23). If the two polypeptide chains of a diabody are identical, then a diabody resulting from their pairing will have two identical antigen binding sites. Polypeptide chains having different sequences can be used to make a diabody with two different antigen binding sites. Similarly, tribodies and tetrabodies are antibodies comprising three and four polypeptide chains, respectively, and forming three and four antigen binding sites, respectively, which can be the same or different.

[0289] Antibody polypeptides are also disclosed in U.S. Pat. No. 6,703,199, including fibronectin polypeptide monobodies. Other antibody polypeptides are disclosed in U.S. Patent Publication 2005/0238646, which are single-chain polypeptides.

[0290] In certain embodiments, an antibody comprises one or more water soluble polymer attachments, including, but not limited to, polyethylene glycol, polyoxyethylene glycol, or polypropylene glycol. See, e.g., U.S. Pat. Nos. 4,640,835, 4,496,689, 4,301,144, 4,670,417, 4,791,192 and 4,179,337. In certain embodiments, a derivative binding agent comprises one or more of monomethoxy-polyethylene glycol, dextran, cellulose, or other carbohydrate based polymers, poly-(N-vinyl pyrrolidone)-polyethylene glycol, propylene glycol homopolymers, a polypropylene oxide/ethylene oxide co-polymer, polyoxyethylated polyols (e.g., glycerol) and polyvinyl alcohol, as well as mixtures of such polymers. In certain embodiments, one or more water-soluble polymer is randomly attached to one or more side chains. In certain embodiments, PEG can act to improve the therapeutic capacity for a binding agent, such as an antibody. Certain such methods are discussed, for example, in U.S. Pat. No. 6,133,426, which is hereby incorporated by reference for any purpose.

[0291] In some embodiments, the ABPs of the present disclosure are monoclonal antibodies that bind to CTLA-4. Monoclonal antibodies of the present disclosure may be generated using a variety of known techniques. In general, monoclonal antibodies that bind to specific antigens may be obtained by methods known to those skilled in the art (see, for example, Kohler et al., Nature 256:495, 1975; Coligan et al. (eds.), Current Protocols in Immunology, 1:2.5.12.6.7 (John Wiley & Sons 1991); U.S. Pat. Nos. RE 32,011, 4,902,614, 4,543,439, and 4,411,993; Monoclonal Antibodies, Hybridomas: A New Dimension in Biological Analyses, Plenum Press, Kennett, McKearn, and Bechtol (eds.) (1980); and Antibodies: A Laboratory Manual, Harlow and Lane (eds.), Cold Spring Harbor Laboratory Press (1988); Picksley et al., “Production of monoclonal antibodies against proteins expressed in E. coli,” in DNA Cloning 2: Expression Systems, 2nd Edition, Glover et al. (eds.), page 93 (Oxford University Press 1995)), Antibody fragments may be derived therefrom using any suitable standard technique such as proteolytic digestion, or optionally, by proteolytic digestion (for example, using papain or pepsin) followed by mild reduction of disulfide bonds and alkylation. Alternatively, such fragments may also be generated by recombinant genetic engineering techniques as described herein.

[0292] Monoclonal antibodies can be obtained by injecting an animal, for example, a rat, hamster, a rabbit, or preferably a mouse, including for example a transgenic or a knock-out, as known in the art, with an immunogen comprising human CTLA-4 [sequence SEQ ID 7001] or a fragment thereof, according to methods known in the art and described herein. The presence of specific antibody production may be monitored after the initial injection and/or after a booster injection by obtaining a serum sample and detecting the presence of an antibody that binds to human CTLA-4 or peptide using any one of several immunodetection methods known in the art and described herein. From animals producing the desired antibodies, lymphoid cells, most commonly cells from the spleen or lymph node, are removed to obtain B-lymphocytes. The B lymphocytes are then fused with a drug-sensitized myeloma cell fusion partner, preferably one that is syngeneic with the immunized animal and that optionally has other desirable properties (e.g., inability to express endogenous Ig gene products, e.g., P3×63-Ag 8.653 (ATCC No. CRL 1580); NSO, SP20) to produce hybridomas, which are immortal eukaryotic cell lines.

[0293] The lymphoid (e.g., spleen) cells and the myeloma cells may be combined for a few minutes with a membrane fusion-promoting agent, such as polyethylene glycol or a nonionic detergent, and then plated at low density on a selective medium that supports the growth of hybridoma cells but not unfused myeloma cells. A preferred selection media is HAT (hypoxanthine, aminopterin, thymidine). After a sufficient time, usually about one to two weeks, colonies of cells are observed. Single colonies are isolated, and antibodies produced by the cells may be tested for binding activity to human CTLA-4, using any one of a variety of immunoassays known in the art and described herein. The hybridomas are cloned (e.g., by limited dilution cloning or by soft agar plaque isolation) and positive clones that produce an antibody specific to CTLA-4 are selected and cultured. The monoclonal antibodies from the hybridoma cultures may be isolated from the supernatants of hybridoma cultures.

[0294] An alternative method for production of a murine monoclonal antibody is to inject the hybridoma cells into the peritoneal cavity of a syngeneic mouse, for example, a mouse that has been treated (e.g., pristane-primed) to promote formation of ascites fluid containing the monoclonal antibody. Monoclonal antibodies can be isolated and purified by a variety of well-established techniques. Such isolation techniques include affinity chromatography with Protein-A Sepharose, size-exclusion chromatography, and ion-exchange chromatography (see, for example, Coligan at pages 2.7.1-2.7.12 and pages 2.9.1-2.9.3; Baines et al., “Purification of Immunoglobulin G (IgG),” in Methods in Molecular Biology, Vol. 10, pages 79-104 (The Humana Press, Inc. 1992)). Monoclonal antibodies may be purified by affinity chromatography using an appropriate ligand selected based on particular properties of the antibody (e.g., heavy or light chain isotype, binding specificity, etc.). Examples of a suitable ligand, immobilized on a solid support, include Protein A, Protein G, an anticonstant region (light chain or heavy chain) antibody, an anti-idiotype antibody, and a TGF-beta binding protein, or fragment or variant thereof.

[0295] Monoclonal antibodies may be produced using any technique known in the art, e.g., by immortalizing spleen cells harvested from the transgenic animal after completion of the immunization schedule. The spleen cells can be immortalized using any technique known in the art, e.g., by fusing them with myeloma cells to produce hybridomas. Hybridoma cell lines are identified that produce an antibody that binds a CTLA-4 polypeptide. Such hybridoma cell lines, and anti-CTLA-4 monoclonal antibodies produced by them, are encompassed by the present disclosure. Myeloma cells for use in hybridoma-producing fusion procedures preferably are non-antibody-producing, have high fusion efficiency, and enzyme deficiencies that render them incapable of growing in certain selective media which support the growth of only the desired fused cells (hybridomas). Examples of suitable cell lines for use in mouse fusions include Sp-20, P3-X63/Ag8, P3-X63-Ag8.653, NS1/1. Ag 4 1, Sp210-Ag14, FO, NSO/U, MPC-11, MPC11-X45-GTG 1.7 and S194/5XX0 Bul; examples of cell lines used in rat fusions include R210.RCY3, Y3-Ag 1.2.3, IR983F and 4B210. Other cell lines useful for cell fusions are U-266, GM1500-GRG2, LICR-LON-HMy2 and UC729-6. Hybridomas or mAbs may be further screened to identify mAbs with particular properties, such as the ability to block a CTLA-4-induced activity.

[0296] An antibody of the present disclosure may also be a fully human monoclonal antibody. An isolated fully human antibody is provided that specifically binds to the CTLA-4, wherein the antigen binding protein possesses at least one in vivo biological activity of a human anti-CTLA-4 antibody.

### 7.4. Nucleic Acids

[0297] In one aspect, the present disclosure provides isolated nucleic acid molecules. The nucleic acids comprise, for example, polynucleotides that encode all or part of an antigen binding protein, for example, one or both chains of an antibody of the present disclosure, or a fragment, derivative, mutein, or variant thereof, polynucleotides sufficient for use as hybridization probes, PCR primers or sequencing primers for identifying, analyzing, mutating or amplifying a polynucleotide encoding a polypeptide, anti-sense nucleic acids for inhibiting expression of a polynucleotide, and complementary sequences of the foregoing. The nucleic acids can be any length. They can be, for example, 5, 10, 15, 20, 25, 30, 35, 40, 45, 50, 75, 100, 125, 150, 175, 200, 250, 300, 350, 400, 450, 500, 750, 1,000, 1,500, 3,000, 5,000 or more nucleotides in length, and/or can comprise one or more additional sequences, for example, regulatory sequences, and/or be part of a larger nucleic acid, for example, a vector. The nucleic acids can be single-stranded or double-stranded and can comprise RNA and/or DNA nucleotides, and artificial variants thereof (e.g., peptide nucleic acids).

[0298] Nucleic acids encoding antibody polypeptides (e.g., heavy or light chain, variable domain only, or full length) can be isolated from B-cells of mice that have been immunized with CTLA-4. The nucleic acid can be isolated by conventional procedures such as polymerase chain reaction (PCR).

[0299] Nucleic acid sequences encoding the variable regions of the heavy and light chain variable regions are shown herein. The skilled artisan will appreciate that, due to the degeneracy of the genetic code, each of the polypeptide sequences disclosed herein is encoded by a large number of other nucleic acid sequences. The present disclosure provides each degenerate nucleotide sequence encoding each antigen binding protein of the present disclosure. In some embodiments, the nucleic acid sequences have been codon optimized. In some embodiments, the nucleic acid sequences have been codon optimized for expression in a mammalian cell.

[0300] The present disclosure further provides nucleic acids that hybridize to other nucleic acids (e.g., nucleic acids comprising a nucleotide sequence of any of CTLA-4 gene) under particular hybridization conditions. Methods for hybridizing nucleic acids are well-known in the art. See, e.g., Curr. Prot. in Mol. Biol., John Wiley & Sons, N.Y. (1989), 6.3.1-6.3.6. As defined herein, a moderately stringent hybridization condition uses a prewashing solution containing 5× sodium chloride/sodium citrate (SSC), 0.5% SDS, 1.0 mM EDTA (pH 8.0), hybridization buffer of about 50% formamide, 6×SSC, and a hybridization temperature of 55° C. (or other similar hybridization solutions, such as one containing about 50% formamide, with a hybridization temperature of 42° C.), and washing conditions of 60° C., in 0.5×SSC, 0.1% SDS. A stringent hybridization condition hybridizes in 6×SSC at 45° C., followed by one or more washes in 0.1×SSC, 0.2% SDS at 68° C. Furthermore, one of skill in the art can manipulate the hybridization and/or washing conditions to increase or decrease the stringency of hybridization such that nucleic acids comprising nucleotide sequences that are at least 65, 70, 75, 80, 85, 90, 95, 98, or 99% identical to each other typically remain hybridized to each other. The basic parameters affecting the choice of hybridization conditions and guidance for devising suitable conditions are set forth by, for example, Sambrook, Fritsch, and Maniatis (1989, Molecular Cloning: A Laboratory Manual, Cold Spring Harbor Laboratory Press, Cold Spring Harbor, N.Y., chapters 9 and 11; and Curr. Prot. in Mol. Biol. 1995, Ausubel et al., eds., John Wiley & Sons, Inc., sections 2.10 and 6.3-6.4), and can be readily determined by those having ordinary skill in the art based on, for example, the length and/or base composition of the DNA.

[0301] Changes can be introduced by mutation into a nucleic acid, thereby leading to changes in the amino acid sequence of a polypeptide (e.g., an antigen binding protein) that it encodes. Mutations can be introduced using any technique known in the art. In one embodiment, one or more particular amino acid residues are changed using, for example, a site-directed mutagenesis protocol. In another embodiment, one or more randomly selected residues are changed using, for example, a random mutagenesis protocol. However it is made, a mutant polypeptide can be expressed and screened for a desired property (e.g., binding to CTLA-4).

[0302] Mutations can be introduced into a nucleic acid without significantly altering the biological activity of a polypeptide that it encodes. For example, one can make nucleotide substitutions leading to amino acid substitutions at non-essential amino acid residues. In one embodiment, a nucleotide sequence provided herein for CTLA-4, or a desired fragment, variant, or derivative thereof, is mutated such that it encodes an amino acid sequence comprising one or more deletions or substitutions of amino acid residues that are shown herein for CTLA-4 to be residues where two or more sequences differ. Alternatively, one or more mutations can be introduced into a nucleic acid that selectively change the biological activity (e.g., binding of CTLA-4) of a polypeptide that it encodes. For example, the mutation can quantitatively or qualitatively change the biological activity. Examples of quantitative changes include increasing, reducing or eliminating the activity. Examples of qualitative changes include changing the antigen specificity of an antigen binding protein.

[0303] In another aspect, the present disclosure provides nucleic acid molecules that are suitable for use as primers or hybridization probes for the detection of nucleic acid sequences of the present disclosure. A nucleic acid molecule of the present disclosure can comprise only a portion of a nucleic acid sequence encoding a full-length polypeptide of the present disclosure, for example, a fragment that can be used as a probe or primer or a fragment encoding an active portion (e.g., a CTLA-4 binding portion) of a polypeptide of the present disclosure.

[0304] Probes based on the sequence of a nucleic acid of the present disclosure can be used to detect the nucleic acid or similar nucleic acids, for example, transcripts encoding a polypeptide of the present disclosure. The probe can comprise a label group, e.g., a radioisotope, a fluorescent compound, an enzyme, or an enzyme co-factor. Such probes can be used to identify a cell that expresses the polypeptide

### 7.5. Expression Vectors

[0305] The present disclosure provides vectors comprising a nucleic acid encoding a polypeptide of the present disclosure or a portion thereof. Examples of vectors include, but are not limited to, plasmids, viral vectors, non-episomal mammalian vectors and expression vectors, for example, recombinant expression vectors.

[0306] In another aspect of the present disclosure, expression vectors containing the nucleic acid molecules and polynucleotides of the present disclosure are also provided, and host cells transformed with such vectors, and methods of producing the polypeptides are also provided. The term “expression vector” refers to a plasmid, phage, virus or vector for expressing (e.g. or inducing expression of) a polypeptide from a polynucleotide sequence. Vectors for the expression of the polypeptides contain at a minimum sequences required for vector propagation and for expression of the cloned insert. An expression vector comprises a transcriptional unit comprising an assembly of (1) a genetic element or elements having a regulatory role in gene expression, for example, promoters or enhancers, (2) a sequence that encodes polypeptides and proteins to be transcribed into mRNA and translated into protein, and (3) appropriate transcription initiation and termination sequences. These sequences may further include a selection marker. Vectors suitable for expression in host cells are readily available and the nucleic acid molecules are inserted into the vectors using standard recombinant DNA techniques. Such vectors can include promoters which function in specific tissues, and viral vectors for the expression of polypeptides in targeted human or animal cells.

[0307] The recombinant expression vectors of the present disclosure can comprise a nucleic acid of the present disclosure in a form suitable for expression of the nucleic acid in a host cell. Accordingly, in one aspect, the present disclosure provides a host cell comprising the polynucleotide or the vector encoding the ABP of the present disclosure. The host cell can be used to produce the ABP ex vivo. In some embodiments, the host cell is administered to a subject to induce expression of the ABP in vivo. In some embodiments, the host cells are used as a therapeutic for treatment of a disease.

[0308] The recombinant expression vectors include one or more regulatory sequences, selected on the basis of the host cells to be used for expression, which is operably linked to the nucleic acid sequence to be expressed. Regulatory sequences include those that direct constitutive expression of a nucleotide sequence in many types of host cells (e.g., SV40 early gene enhancer, Rous sarcoma virus promoter and cytomegalovirus promoter), those that direct expression of the nucleotide sequence only in certain host cells (e.g., tissue-specific regulatory sequences, see Voss et al., 1986, Trends Biochem. Sci. 11:287, Maniatis et al., 1987, Science 236:1237, incorporated by reference herein in their entireties), and those that direct inducible expression of a nucleotide sequence in response to particular treatment or condition (e.g., the metallothionin promoter in mammalian cells and the tet-responsive and/or streptomycin responsive promoter in both prokaryotic and eukaryotic systems (see id.). It will be appreciated by those skilled in the art that the design of the expression vector can depend on such factors as the choice of the host cell to be transformed, the level of expression of protein desired, etc. The expression vectors of the present disclosure can be introduced into host cells to thereby produce proteins or peptides, including fusion proteins or peptides, encoded by nucleic acids as described herein.

[0309] In some embodiments, the expression vector is an expression vector purified from one of the clones of the library of CTLA-4 binding clones deposited under ATCC Accession No. PTA-125512. In some embodiments, the expression vector is generated by genetic modification of one of an expression vector in one of the clones purified from the library of CTLA-4 binding clones deposited under ATCC Accession No. PTA-125512. In some embodiments, the expression vector is generated by using variable region sequences of heavy and light chains of one of the clones of the library of CTLA-4 binding clones deposited under ATCC Accession No. PTA-125512.

[0310] The present disclosure further provides methods of making polypeptides. A variety of other expression/host systems may be utilized. Vector DNA can be introduced into prokaryotic or eukaryotic systems via conventional transformation or transfection techniques. These systems include but are not limited to microorganisms such as bacteria (for example, E. coli) transformed with recombinant bacteriophage, plasmid or cosmid DNA expression vectors; yeast transformed with yeast expression vectors; insect cell systems infected with virus expression vectors (e.g., baculovirus); plant cell systems transfected with virus expression vectors (e.g., cauliflower mosaic virus, CaMV; tobacco mosaic virus, TMV) or transformed with bacterial expression vectors (e.g., Ti or pBR322 plasmid); or animal cell systems. Mammalian cells useful in recombinant protein production include but are not limited to VERO cells, HeLa cells, Chinese hamster ovary (CHO) cell lines, or their derivatives such as Veggie CHO and related cell lines which grow in serum-free media (see Rasmussen et al., 1998, Cytotechnology 28:31) or CHO strain DX-B11, which is deficient in DHFR (see Urlaub et al., 1980, Proc. Natl. Acad. Sci. USA 77:4216-20) COS cells such as the COS-7 line of monkey kidney cells (ATCC CRL 1651) (see Gluzman et al., 1981, Cell 23:175), W138, BHK, HepG2, 3T3 (ATCC CCL 163), RIN, MDCK, A549, PC12, K562, L cells, C127 cells, BHK (ATCC CRL 10) cell lines, the CV1/EBNA cell line derived from the African green monkey kidney cell line CV1 (ATCC CCL 70) (see McMahan et al., 1991, EMBO J. 10:2821), human embryonic kidney cells such as 293, 293 EBNA or MSR 293, human epidermal A431 cells, human Colo205 cells, other transformed primate cell lines, normal diploid cells, cell strains derived from in vitro culture of primary tissue, primary explants, HL-60, U937, HaK or Jurkat cells. Mammalian expression allows for the production of secreted or soluble polypeptides which may be recovered from the growth medium.

[0311] In some embodiments, the mammalian cells used in recombinant protein production include engineered cells that produce a reduced amount of core fucosylation (e.g., relative to the amount of core fucosylation of a non-engineered cell). In some embodiments, the mammalian cells used in recombinant protein production include engineered cells that produce a reduced amount of fucose (e.g., relative to the amount of fucose of a non-engineered cell). In some embodiments, the mammalian cells used in recombinant protein production comprise CHO cells. In some embodiments, the mammalian cell is a GlymaxX® cell line. In certain embodiments, the cell line produces afucosylated recombinant proteins. In certain embodiments, the mammalian cell has less or reduced fucosylation, e.g., where the mammalian cell produces a reduced amount of fucose. In certain embodiments, during cell culture, the method includes adding a fucosylation inhibitor to the media that the cells are grown in. Non-limiting examples of fucosylation inhibitors include: fucosyltransferase (FUT) inhibitor, 2-fluoro peracetylated fucose (2FF), 2-fluorofucose (SGN-2FF), Fucotrim I (P-D-Rha6F2-TP), Fucotrim II (P-D-Rha6F3-TP), A2FF1P, and 132FF1. In some embodiments, the mammalian cells used in recombinant protein production are engineered to overexpress glycosyltransferase. In certain embodiments, the glycosyltransferase is Beta-1,4-mannosyl-glycoprotein 4-beta-N-acetylglucosaminyltransferase.

[0312] In some embodiments, the ABP comprises an afucosylated Fc region. In some embodiments, the antibody is afucosylated (e.g., the N-glycan of the Fc region of the antibody does not have core fucose sugar units).

[0313] In certain embodiments, the glycosyltransferase competes with FuT8. In some embodiments, the mammalian cell line used in recombinant protein production produces an ABP that has reduced fucosylation (e.g. less than 70% fucosylation, less than 65% fucosylation, less than 60% fucosylation, less than 55% fucosylation, less than 50% fucosylation, less than 45% fucosylation, less than 40% fucosylation, less than 35% fucosylation, less than 30% fucosylation, less than 25% fucosylation, less than 20% fucosylation, less than 15% fucosylation, less than 10% fucosylation, less than 5% fucosylation, or less than 2.5% fucosylation).

[0314] In some embodiments, the mammalian cell line used in recombinant protein production produces an ABP that has increased fucosylation (e.g. more than 99% fucosylation, more than 95% fucosylation, more than 90% fucosylation, more than 85% fucosylation, more than 80% fucosylation, more than 75% fucosylation, more than 70% fucosylation, more than 65% fucosylation, more than 60% fucosylation, more than 55% fucosylation, more than 50% fucosylation, more than 45% fucosylation, more than 40% fucosylation, more than 35% fucosylation, more than 30% fucosylation, more than 25% fucosylation, more than 20% fucosylation, more than 15% fucosylation, more than 10% fucosylation, more than 5% fucosylation, or more than 2.5% fucosylation).

[0315] For stable transfection of mammalian cells, it is known that, depending upon the expression vector and transfection technique used, only a small fraction of cells may integrate the foreign DNA into their genome. In order to identify and select these integrants, a gene that encodes a selectable marker (e.g., for resistance to antibiotics) is generally introduced into the host cells along with the gene of interest. Once such cells are transformed with vectors that contain selectable markers as well as the desired expression cassette, the cells can be allowed to grow in an enriched media before they are switched to selective media, for example. The selectable marker is designed to allow growth and recovery of cells that successfully express the introduced sequences. Resistant clumps of stably transformed cells can be proliferated using tissue culture techniques appropriate to the cell line employed. An overview of expression of recombinant proteins is found in Methods of Enzymology, v. 185, Goeddell, D. V., ed., Academic Press (1990). Preferred selectable markers include those which confer resistance to drugs, such as G418, hygromycin and methotrexate. Cells stably transfected with the introduced nucleic acid can be identified by drug selection (e.g., cells that have incorporated the selectable marker gene will survive, while the other cells die), among other methods.

[0316] The transformed cells can be cultured under conditions that promote expression of the polypeptide, and the polypeptide recovered by conventional protein purification procedures (as defined above). One such purification procedure includes the use of affinity chromatography, e.g., over a matrix having all or a portion (e.g., the extracellular domain) of CTL A-4 bound thereto. Polypeptides contemplated for use herein include substantially homogeneous recombinant mammalian anti-CTLA-4 antibody polypeptides substantially free of contaminating endogenous materials.

[0317] In some cases, such as in expression using prokaryotic systems, the expressed polypeptides of this disclosure may need to be “refolded” and oxidized into a proper tertiary structure and disulfide linkages generated in order to be biologically active. Refolding can be accomplished using a number of procedures well known in the art. Such methods include, for example, exposing the solubilized polypeptide to a pH usually above 7 in the presence of a chaotropic agent. The selection of chaotrope is similar to the choices used for inclusion body solubilization; however a chaotrope is typically used at a lower concentration. Exemplary chaotropic agents are guanidine and urea. In most cases, the refolding/oxidation solution will also contain a reducing agent plus its oxidized form in a specific ratio to generate a particular redox potential which allows for disulfide shuffling to occur for the formation of cysteine bridges. Some commonly used redox couples include cysteine/cystamine, glutathione/dithiobisGSH, cupric chloride, dithiothreitol DTT/dithiane DTT, and 2-mercaptoethanol (bME)/dithio-bME. In many instances, a co-solvent may be used to increase the efficiency of the refolding. Commonly used cosolvents include glycerol, polyethylene glycol of various molecular weights, and arginine.

[0318] In addition, the polypeptides can be synthesized in solution or on a solid support in accordance with conventional techniques. Various automatic synthesizers are commercially available and can be used in accordance with known protocols. See, for example, Stewart and Young, Solid Phase Peptide Synthesis, 2d. Ed., Pierce Chemical Co. (1984); Tam et al., J Am Chem Soc, 105:6442, (1983); Merrifield, Science 232:341-347 (1986); Barany and Merrifield, The Peptides, Gross and Meienhofer, eds, Academic Press, New York, 1-284; Barany et al., Int J Pep Protein Res, 30:705-739 (1987).

[0319] The polypeptides and proteins of the present disclosure can be purified according to protein purification techniques well known to those of skill in the art. These techniques involve, at one level, the crude fractionation of the proteinaceous and non-proteinaceous fractions. Having separated the peptide polypeptides from other proteins, the peptide or polypeptide of interest can be further purified using chromatographic and electrophoretic techniques to achieve partial or complete purification (or purification to homogeneity). The term “purified polypeptide” as used herein, is intended to refer to a composition, isolatable from other components, wherein the polypeptide is purified to any degree relative to its naturally-obtainable state. A purified polypeptide therefore also refers to a polypeptide that is free from the environment in which it may naturally occur. Generally, “purified” will refer to a polypeptide composition that has been subjected to fractionation to remove various other components, and which composition substantially retains its expressed biological activity. Where the term “substantially purified” is used, this designation will refer to a peptide or polypeptide composition in which the polypeptide or peptide forms the major component of the composition, such as constituting about 50%, about 60%, about 70%, about 80%, about 85%, or about 90% or more of the proteins in the composition.

[0320] Various techniques suitable for use in purification will be well known to those of skill in the art. These include, for example, precipitation with ammonium sulphate, PEG, antibodies (immunoprecipitation) and the like or by heat denaturation, followed by centrifugation; chromatography such as affinity chromatography (Protein-A columns), ion exchange, gel filtration, reverse phase, hydroxylapatite, hydrophobic interaction chromatography, isoelectric focusing, gel electrophoresis, and combinations of these techniques. As is generally known in the art, it is believed that the order of conducting the various purification steps may be changed, or that certain steps may be omitted, and still result in a suitable method for the preparation of a substantially purified polypeptide. Exemplary purification steps are provided in the Examples below.

[0321] Various methods for quantifying the degree of purification of polypeptide will be known to those of skill in the art in light of the present disclosure. These include, for example, determining the specific binding activity of an active fraction, or assessing the amount of peptide or polypeptide within a fraction by SDS/PAGE analysis. A preferred method for assessing the purity of a polypeptide fraction is to calculate the binding activity of the fraction, to compare it to the binding activity of the initial extract, and to thus calculate the degree of purification, herein assessed by a “-fold purification number.” The actual units used to represent the amount of binding activity will, of course, be dependent upon the particular assay technique chosen to follow the purification and whether or not the polypeptide or peptide exhibits a detectable binding activity.

### 7.6. Method of Generating Antibodies

[0322] Fully human monoclonal antibodies may be generated by any number of techniques with which those having ordinary skill in the art will be familiar. Such methods include, but are not limited to, Epstein Barr Virus (EBV) transformation of human peripheral blood cells (e.g., containing B lymphocytes), in vitro immunization of human B-cells, fusion of spleen cells from immunized transgenic mice carrying inserted human immunoglobulin genes, isolation from human immunoglobulin V region phage libraries, or other procedures as known in the art and based on the disclosure herein. For example, fully human monoclonal antibodies may be obtained from transgenic mice that have been engineered to produce specific human antibodies in response to antigenic challenge. Methods for obtaining fully human antibodies from transgenic mice are described, for example, by Green et al., Nature Genet. 7:13, 1994; Lonberg et al., Nature 368:856, 1994; Taylor et al., Int. Immun. 6:579, 1994; U.S. Pat. No. 5,877,397; Bruggemann et al., 1997 Curr. Opin. Biotechnol. 8:455-58; Jakobovits et al., 1995 Ann. N. Y. Acad. Sci. 764:525-35. In this technique, elements of the human heavy and light chain locus are introduced into strains of mice derived from embryonic stem cell lines that contain targeted disruptions of the endogenous heavy chain and light chain loci (see also Bruggemann et al., Curr. Opin. Biotechnol. 8:455-58 (1997)). For example, human immunoglobulin transgenes may be mini-gene constructs, or transloci on yeast artificial chromosomes, which undergo B-cell-specific DNA rearrangement and hypermutation in the mouse lymphoid tissue. Fully human monoclonal antibodies may be obtained by immunizing the transgenic mice, which may then produce human antibodies specific for CTLA-4. Lymphoid cells of the immunized transgenic mice can be used to produce human antibody-secreting hybridomas according to the methods described herein. Polyclonal sera containing fully human antibodies may also be obtained from the blood of the immunized animals.

[0323] Another method for generating human antibodies of the present disclosure includes immortalizing human peripheral blood cells by EBV transformation. See, e.g., U.S. Pat. No. 4,464,456. Such an immortalized B-cell line (or lymphoblastoid cell line) producing a monoclonal antibody that specifically binds to CTLA-4 can be identified by immunodetection methods as provided herein, for example, an ELISA, and then isolated by standard cloning techniques. The stability of the lymphoblastoid cell line producing an anti-CTLA-4 antibody may be improved by fusing the transformed cell line with a murine myeloma to produce a mouse-human hybrid cell line according to methods known in the art (see, e.g., Glasky et al., Hybridoma 8:377-89 (1989)). Still another method to generate human monoclonal antibodies is in vitro immunization, which includes priming human splenic B-cells with human CTLA-4, followed by fusion of primed B-cells with a heterohybrid fusion partner. See, e.g., Boemer et al., 1991 J. Immunol. 147:86-95.

[0324] In certain embodiments, a B-cell that is producing an anti-human CTLA-4 antibody is selected and the light chain and heavy chain variable regions are cloned from the B-cell according to molecular biology techniques known in the art (WO 92/02551; U.S. Pat. No. 5,627,052; Babcook et al., Proc. Natl. Acad. Sci. USA 93:7843-48 (1996)) and described herein. B-cells from an immunized animal may be isolated from the spleen, lymph node, or peripheral blood sample by selecting a cell that is producing an antibody that specifically binds to CTLA-4. B-cells may also be isolated from humans, for example, from a peripheral blood sample.

[0325] Methods for detecting single B-cells that are producing an antibody with the desired specificity are well known in the art, for example, by plaque formation, fluorescence-activated cell sorting, in vitro stimulation followed by detection of specific antibody, and the like. Methods for selection of specific antibody-producing B-cells include, for example, preparing a single cell suspension of B-cells in soft agar that contains human CTLA-4. Binding of the specific antibody produced by the B-cell to the antigen results in the formation of a complex, which may be visible as an immunoprecipitate.

[0326] In some embodiments, specific antibody-producing B-cells are selected by using a method that allows identification natively paired antibodies. For example, a method described in Adler et al., A natively paired antibody library yields drug leads with higher sensitivity and specificity than a randomly paired antibody library, MAbs (2018), which is incorporated by reference in its entirety herein, can be employed. The method combines microfluidic technology, molecular genomics, yeast single-chain variable fragment (scFv) display, fluorescence-activated cell sorting (FACS) and deep sequencing as summarized in FIG. 1 adopted from Adler et al. In short, B cells can be isolated from immunized animals and then pooled. The B cells are encapsulated into droplets with oligo-dT beads and a lysis solution, and mRNA-bound beads are purified from the droplets, and then injected into a second emulsion with an OE-RT-PCR amplification mix that generates DNA amplicons that encode scFv with native pairing of heavy and light chain Ig. Libraries of natively paired amplicons are then electroporated into yeast for scFv display. FACS is used to identify high affinity scFv. Finally, deep antibody sequencing can be used to identify all clones in the pre- and post-sort scFv libraries.

[0327] After the B-cells producing the desired antibody are selected, the specific antibody genes may be cloned by isolating and amplifying DNA or mRNA according to methods known in the art and described herein.

[0328] The methods for obtaining antibodies of the present disclosure can also adopt various phage display technologies known in the art. See, e.g., Winter et al., 1994 Annu. Rev. Immunol. 12:433-55; Burton et al., 1994 Adv. Immunol. 57:191-280. Human or murine immunoglobulin variable region gene combinatorial libraries may be created in phage vectors that can be screened to select Ig fragments (Fab, Fv, sFv, or multimers thereof) that bind specifically to CTLA-4 binding protein or variant or fragment thereof. See, e.g., U.S. Pat. No. 5,223,409; Huse et al., 1989 Science 246:1275-81; Sastry et al., Proc. Natl. Acad. Sci. USA 86:5728-32 (1989); Alting-Mees et al., Strategies in Molecular Biology 3:1-9 (1990); Kang et al., 1991 Proc. Natl. Acad. Sci. USA 88:4363-66; Hoogenboom et al., 1992 J. Molec. Biol. 227:381-388; Schlebusch et al., 1997 Hybridoma 16:47-52 and references cited therein. For example, a library containing a plurality of polynucleotide sequences encoding Ig variable region fragments may be inserted into the genome of a filamentous bacteriophage, such as M13 or a variant thereof, in frame with the sequence encoding a phage coat protein. A fusion protein may be a fusion of the coat protein with the light chain variable region domain and/or with the heavy chain variable region domain. According to certain embodiments, immunoglobulin Fab fragments may also be displayed on a phage particle (see, e.g., U.S. Pat. No. 5,698,426).

[0329] Antibody fragments fused to another protein, such as a minor coat protein, can be also used to enrich phage with antigen. Then, using a random combinatorial library of rearranged heavy (V_{H}) and light (V_{L}) chains from mice immune to the antigen (e.g. CTLA-4), diverse libraries of antibody fragments are displayed on the surface of the phage. These libraries can be screened for complementary variable domains, and the domains purified by, for example, affinity column. See Clackson et al., Nature, V. 352 pp. 624-628 (1991).

[0330] Heavy and light chain immunoglobulin cDNA expression libraries may also be prepared in lambda phage, for example, using λImmunoZap™(H) and λImmunoZap™(L) vectors (Stratagene, La Jolla, Calif.). Briefly, mRNA is isolated from a B-cell population, and used to create heavy and light chain immunoglobulin cDNA expression libraries in the λImmunoZap(H) and λImmunoZap(L) vectors. These vectors may be screened individually or co-expressed to form Fab fragments or antibodies (see Huse et al., supra; see also Sastry et al., supra). Positive plaques may subsequently be converted to a non-lytic plasmid that allows high level expression of monoclonal antibody fragments from E. coli.

[0331] In one embodiment, in a hybridoma the variable regions of a gene expressing a monoclonal antibody of interest are amplified using nucleotide primers. These primers may be synthesized by one of ordinary skill in the art, or may be purchased from commercially available sources. (See, e.g., Stratagene (La Jolla, Calif.), which sells primers for mouse and human variable regions including, among others, primers for V_{Ha}, V_{Hb}, V_{Hc}, V_{Hd}, C_{H1}, V_{L} and C_{L} regions.) These primers may be used to amplify heavy or light chain variable regions, which may then be inserted into vectors such as ImmunoZAP™H or ImmunoZAP™L (Stratagene), respectively. These vectors may then be introduced into E. coli, yeast, or mammalian-based systems for expression. Large amounts of a single-chain protein containing a fusion of the V_{H} and V_{L} domains may be produced using these methods (see Bird et al., Science 242:423-426, 1988).

[0332] Once cells producing antibodies according to the disclosure have been obtained using any of the above-described immunization and other techniques, the specific antibody genes may be cloned by isolating and amplifying DNA or mRNA therefrom according to standard procedures as described herein. The antibodies produced therefrom may be sequenced and the CDRs identified and the DNA coding for the CDRs may be manipulated as described previously to generate other antibodies according to the disclosure.

[0333] CTLA-4 binding agents of the present disclosure preferably modulate CTLA-4 function in the cell-based assay described herein and/or the in vivo assay described herein and/or bind to one or more of the domains described herein and/or cross-block the binding of one of the antibodies described in this application and/or are cross-blocked from binding CTLA-4 by one of the antibodies described in this application. Accordingly such binding agents can be identified using the assays described herein.

[0334] In certain embodiments, antibodies are generated by first identifying antibodies that bind to one or more of the domains provided herein and/or neutralize in the cell-based and/or in vivo assays described herein and/or cross-block the antibodies described in this application and/or are cross-blocked from binding CTLA-4 by one of the antibodies described in this application. The CDR regions from these antibodies are then used to insert into appropriate biocompatible frameworks to generate CTLA-4 binding agents. The non-CDR portion of the binding agent may be composed of amino acids, or may be a non-protein molecule. The assays described herein allow the characterization of binding agents. Preferably the binding agents of the present disclosure are antibodies as defined herein.

[0335] Other antibodies according to the disclosure may be obtained by conventional immunization and cell fusion procedures as described herein and known in the art.

[0336] Molecular evolution of the complementarity determining regions (CDRs) in the center of the antibody binding site also has been used to isolate antibodies with increased affinity, for example, antibodies having increased affinity for c-erbB-2, as described by Schier et al., 1996, J. Mol. Biol. 263:551. Accordingly, such techniques are useful in preparing antibodies to CTLA-4. Antigen binding proteins directed against a CTLA-4 can be used, for example, in assays to detect the presence of CTLA-4 polypeptides, either in vitro or in vivo. The antigen binding proteins also may be employed in purifying CTLA-4 proteins by immunoaffinity chromatography.

[0337] Although human, partially human, or humanized antibodies will be suitable for many applications, particularly those involving administration of the antibody to a human subject, other types of antigen binding proteins will be suitable for certain applications. Non-human antibodies of the present disclosure can be, for example, derived from any antibody-producing animal, such as mouse, rat, rabbit, goat, donkey, or non-human primate (such as monkey (e.g., cynomolgus or rhesus monkey) or ape (e.g., chimpanzee)). An antibody from a particular species can be made by, for example, immunizing an animal of that species with the desired immunogen (e.g., a CTLA-4 polypeptide) or using an artificial system for generating antibodies of that species (e.g., a bacterial or phage display-based system for generating antibodies of a particular species), or by converting an antibody from one species into an antibody from another species by replacing, e.g., the constant region of the antibody with a constant region from the other species, or by replacing one or more amino acid residues of the antibody so that it more closely resembles the sequence of an antibody from the other species. In one embodiment, the antibody is a chimeric antibody comprising amino acid sequences derived from antibodies from two or more different species.

[0338] Antigen binding proteins may be prepared, and screened for desired properties, by any of a number of conventional techniques. Certain of the techniques involve isolating a nucleic acid encoding a polypeptide chain (or portion thereof) of an antigen binding protein of interest (e.g., an anti-CTLA-4 antibody), and manipulating the nucleic acid through recombinant DNA technology. The nucleic acid may be fused to another nucleic acid of interest, or altered (e.g., by mutagenesis or other conventional techniques) to add, delete, or substitute one or more amino acid residues, for example. Furthermore, the antigen binding proteins may be purified from cells that naturally express them (e.g., an antibody can be purified from a hybridoma that produces it), or produced in recombinant expression systems, using any technique known in the art. See, for example, Monoclonal Antibodies, Hybridomas: A New Dimension in Biological Analyses, Kennet et al. (eds.), Plenum Press, New York (1980); and Antibodies: A Laboratory Manual, Harlow and Land (eds.), Cold Spring Harbor Laboratory Press, Cold Spring Harbor, N.Y., (1988).

[0339] Any expression system known in the art can be used to make the recombinant polypeptides of the present disclosure. Expression systems are detailed comprehensively above. In general, host cells are transformed with a recombinant expression vector that comprises DNA encoding a desired polypeptide. Among the host cells that may be employed are prokaryotes, yeast or higher eukaryotic cells. Prokaryotes include gram negative or gram positive organisms, for example E. coli or Bacilli. Higher eukaryotic cells include insect cells and established cell lines of mammalian origin. Examples of suitable mammalian host cell lines include the COS-7 line of monkey kidney cells (ATCC CRL 1651) (Gluzman et al., 1981, Cell 23:175), L cells, 293 cells, C127 cells, 3T3 cells (ATCC CCL 163), Chinese hamster ovary (CHO) cells, HeLa cells, BHK (ATCC CRL 10) cell lines, and the CVI/EBNA cell line derived from the African green monkey kidney cell line CVI (ATCC CCL 70) as described by McMahan et al., 1991, EMBO J. 10: 2821. Appropriate cloning and expression vectors for use with bacterial, fungal, yeast, and mammalian cellular hosts are described by Pouwels et al. (Cloning Vectors: A Laboratory Manual, Elsevier, New York, 1985).

[0340] It will be appreciated that an antibody of the present disclosure may have at least one amino acid substitution, providing that the antibody retains binding specificity. Therefore, modifications to the antibody structures are encompassed within the scope of the present disclosure. These may include amino acid substitutions, which may be conservative or non-conservative that do not destroy the CTLA-4 binding capability of an antibody. Conservative amino acid substitutions may encompass non-naturally occurring amino acid residues, which are typically incorporated by chemical peptide synthesis rather than by synthesis in biological systems. These include peptidomimetics and other reversed or inverted forms of amino acid moieties. A conservative amino acid substitution may also involve a substitution of a native amino acid residue with a normative residue such that there is little or no effect on the polarity or charge of the amino acid residue at that position.

[0341] Non-conservative substitutions may involve the exchange of a member of one class of amino acids or amino acid mimetics for a member from another class with different physical properties (e.g. size, polarity, hydrophobicity, charge). Such substituted residues may be introduced into regions of the human antibody that are homologous with non-human antibodies, or into the non-homologous regions of the molecule.

[0342] Moreover, one skilled in the art may generate test variants containing a single amino acid substitution at each desired amino acid residue. The variants can then be screened using activity assays known to those skilled in the art. Such variants could be used to gather information about suitable variants. For example, if one discovered that a change to a particular amino acid residue resulted in destroyed, undesirably reduced, or unsuitable activity, variants with such a change may be avoided. In other words, based on information gathered from such routine experiments, one skilled in the art can readily determine the amino acids where further substitutions should be avoided either alone or in combination with other mutations.

[0343] A skilled artisan will be able to determine suitable variants of the polypeptide as set forth herein using well-known techniques. In certain embodiments, one skilled in the art may identify suitable areas of the molecule that may be changed without destroying activity by targeting regions not believed to be important for activity. In certain embodiments, one can identify residues and portions of the molecules that are conserved among similar polypeptides. In certain embodiments, even areas that may be important for biological activity or for structure may be subject to conservative amino acid substitutions without destroying the biological activity or without adversely affecting the polypeptide structure.

[0344] Additionally, one skilled in the art can review structure-function studies identifying residues in similar polypeptides that are important for activity or structure. In view of such a comparison, one can predict the importance of amino acid residues in a protein that correspond to amino acid residues which are important for activity or structure in similar proteins. One skilled in the art may opt for chemically similar amino acid substitutions for such predicted important amino acid residues.

[0345] One skilled in the art can also analyze the three-dimensional structure and amino acid sequence in relation to that structure in similar polypeptides. In view of such information, one skilled in the art may predict the alignment of amino acid residues of an antibody with respect to its three dimensional structure. In certain embodiments, one skilled in the art may choose not to make radical changes to amino acid residues predicted to be on the surface of the protein, since such residues may be involved in important interactions with other molecules.

[0346] A number of scientific publications have been devoted to the prediction of secondary structure. See Moult J., Curr. Op. in Biotech., 7(4):422-427 (1996), Chou et al., Biochem., 13(2):222-245 (1974); Chou et al., Biochem., 113(2):211-222 (1974); Chou et al., Adv. Enzymol. Relat. Areas Mol. Biol., 47:45-148 (1978); Chou et al., Ann. Rev. Biochem., 47:251-276 and Chou et al., Biophys. J., 26:367-384 (1979). Moreover, computer programs are currently available to assist with predicting secondary structure. One method of predicting secondary structure is based upon homology modeling. For example, two polypeptides or proteins which have a sequence identity of greater than 30%, or similarity greater than 40% often have similar structural topologies. The recent growth of the protein structural database (PDB) has provided enhanced predictability of secondary structure, including the potential number of folds within a polypeptide's or protein's structure. See Holm et al., Nucl. Acid. Res., 27(1):244-247 (1999). It has been suggested (Brenner et al., Curr. Op. Struct. Biol., 7(3):369-376 (1997)) that there are a limited number of folds in a given polypeptide or protein and that once a critical number of structures have been resolved, structural prediction will become dramatically more accurate.

[0347] Additional methods of predicting secondary structure include “threading” (Jones, D., Curr. Opin. Struct. Biol., 7(3):377-87 (1997); Sippl et al., Structure, 4(1):15-19 (1996)), “profile analysis” (Bowie et al., Science, 253:164-170 (1991); Gribskov et al., Meth. Enzym., 183:146-159 (1990); Gribskov et al., Proc. Nat. Acad. Sci., 84(13):4355-4358 (1987)), and “evolutionary linkage” (See Holm, supra (1999), and Brenner, supra (1997)).

[0348] In certain embodiments, variants of antibodies include glycosylation variants wherein the number and/or type of glycosylation site has been altered compared to the amino acid sequences of a parent polypeptide. In certain embodiments, variants comprise a greater or a lesser number of N-linked glycosylation sites than the native protein. An N-linked glycosylation site is characterized by the sequence: Asn-X-Ser or Asn-X-Thr, wherein the amino acid residue designated as X can be any amino acid residue except proline. The substitution of amino acid residues to create this sequence provides a potential new site for the addition of an N-linked carbohydrate chain. Alternatively, substitutions which eliminate this sequence will remove an existing N-linked carbohydrate chain. Also provided is a rearrangement of N-linked carbohydrate chains wherein one or more N-linked glycosylation sites (typically those that are naturally occurring) are eliminated and one or more new N-linked sites are created. Additional preferred antibody variants include cysteine variants wherein one or more cysteine residues are deleted from or substituted for another amino acid (e.g, serine) as compared to the parent amino acid sequence. Cysteine variants can be useful when antibodies must be refolded into a biologically active conformation such as after the isolation of insoluble inclusion bodies. Cysteine variants generally have fewer cysteine residues than the native protein, and typically have an even number to minimize interactions resulting from unpaired cysteines.

[0349] Desired amino acid substitutions (whether conservative or non-conservative) can be determined by those skilled in the art at the time such substitutions are desired. In certain embodiments, amino acid substitutions can be used to identify important residues of antibodies to CTLA-4, or to increase or decrease the affinity of the antibodies to CTLA-4 described herein.

[0350] According to certain embodiments, preferred amino acid substitutions are those which: (1) reduce susceptibility to proteolysis, (2) reduce susceptibility to oxidation, (3) alter binding affinity for forming protein complexes, (4) alter binding affinities, and/or (4) confer or modify other physiochemical or functional properties on such polypeptides. According to certain embodiments, single or multiple amino acid substitutions (in certain embodiments, conservative amino acid substitutions) may be made in the naturally-occurring sequence (in certain embodiments, in the portion of the polypeptide outside the domain(s) forming intermolecular contacts). In certain embodiments, a conservative amino acid substitution typically may not substantially change the structural characteristics of the parent sequence (e.g., a replacement amino acid should not tend to break a helix that occurs in the parent sequence, or disrupt other types of secondary structure that characterizes the parent sequence). Examples of art-recognized polypeptide secondary and tertiary structures are described in Proteins, Structures and Molecular Principles (Creighton, Ed., W. H. Freeman and Company, New York (1984)); Introduction to Protein Structure (C. Branden and J. Tooze, eds., Garland Publishing, New York, N.Y. (1991)); and Thornton et al. Nature 354:105 (1991), which are each incorporated herein by reference.

[0351] In certain embodiments, antibodies of the present disclosure may be chemically bonded with polymers, lipids, or other moieties.

[0352] The binding agents may comprise at least one of the CDRs described herein incorporated into a biocompatible framework structure. In one example, the biocompatible framework structure comprises a polypeptide or portion thereof that is sufficient to form a conformationally stable structural support, or framework, or scaffold, which is able to display one or more sequences of amino acids that bind to an antigen (e.g., CDRs, a variable region, etc.) in a localized surface region. Such structures can be a naturally occurring polypeptide or polypeptide “fold” (a structural motif), or can have one or more modifications, such as additions, deletions or substitutions of amino acids, relative to a naturally occurring polypeptide or fold. These scaffolds can be derived from a polypeptide of any species (or of more than one species), such as a human, other mammal, other vertebrate, invertebrate, plant, bacteria or virus.

[0353] Typically the biocompatible framework structures are based on protein scaffolds or skeletons other than immunoglobulin domains. For example, those based on fibronectin, ankyrin, lipocalin, neocarzinostain, cytochrome b, CP1 zinc finger, PST1, coiled coil, LACI-D1, Z domain and tendamistat domains may be used (See e.g., Nygren and Uhlen, 1997, Curr. Opin. in Struct. Biol., 7, 463-469).

[0354] Humanized antibodies can be produced using techniques known to those skilled in the art (Zhang, W., et al., Molecular Immunology. 42(12):1445-1451, 2005; Hwang W. et al., Methods. 36(1):35-42, 2005; Dall' Acqua W F, et al., Methods 36(1):43-60, 2005; and Clark, M., Immunology Today. 21(8):397-402, 2000).

[0355] Additionally, one skilled in the art will recognize that suitable binding agents include portions of these antibodies, such as one or more of CDR1-L1 to 28 with SEQ ID NOS 1001-1028; CDR2-L1 to 28 with SEQ ID NOS 2001-2028; CDR3-L1 to 28 with SEQ ID NOS 3001-3028; CDR1-H1 to 28 with SEQ ID NOS 4001-4028; CDR2-H1 to 28 with SEQ ID NOS 5001-5028; and CDR3-H1 to 28 with SEQ ID NOS 6001-6028, as specifically disclosed herein. At least one of the regions of CDR regions may have at least one amino acid substitution from the sequences provided here, provided that the antibody retains the binding specificity of the non-substituted CDR. The non-CDR portion of the antibody may be a non-protein molecule, wherein the binding agent cross-blocks the binding of an antibody disclosed herein to CTLA-4 and/or neutralizes CTLA-4. The non-CDR portion of the antibody may be a non-protein molecule in which the antibody exhibits a similar binding pattern to human CTLA-4 peptides in a competition binding assay as that exhibited by at least one of antibodies A1-A28, and/or neutralizes CTLA-4. The non-CDR portion of the antibody may be composed of amino acids, wherein the antibody is a recombinant binding protein or a synthetic peptide, and the recombinant binding protein cross-blocks the binding of an antibody disclosed herein to CTLA-4 and/or neutralizes CTLA-4. The non-CDR portion of the antibody may be composed of amino acids, wherein the antibody is a recombinant antibody, and the recombinant antibody exhibits a similar binding pattern to human CTLA-4 peptides in the human CTLA-4 peptide epitope competition binding assay (described hereinbelow) as that exhibited by at least one of the antibodies A1-A28, and/or neutralizes CTLA-4.

[0356] Where an antibody comprises one or more of CDR1-H, CDR2-H, CDR3-H, CDR1-L, CDR2-L and CDR3-L as described above, it may be obtained by expression from a host cell containing DNA coding for these sequences. A DNA coding for each CDR sequence may be determined on the basis of the amino acid sequence of the CDR and synthesized together with any desired antibody variable region framework and constant region DNA sequences using oligonucleotide synthesis techniques, site-directed mutagenesis and polymerase chain reaction (PCR) techniques as appropriate. DNA coding for variable region frameworks and constant regions is widely available to those skilled in the art from genetic sequences databases such as GenBank®.

[0357] Once synthesized, the DNA encoding an antibody of the present disclosure or fragment thereof may be propagated and expressed according to any of a variety of well-known procedures for nucleic acid excision, ligation, transformation, and transfection using any number of known expression vectors. Thus, in certain embodiments expression of an antibody fragment may be preferred in a prokaryotic host, such as Escherichia coli (see, e.g., Pluckthun et al., 1989 Methods Enzymol. 178:497-515). In certain other embodiments, expression of the antibody or a fragment thereof may be preferred in a eukaryotic host cell, including yeast (e.g., Saccharomyces cerevisiae, Schizosaccharomyces pombe, and Pichia pastoris), animal cells (including mammalian cells) or plant cells. Examples of suitable animal cells include, but are not limited to, myeloma (such as a mouse NSO line), COS, CHO, or hybridoma cells. Examples of plant cells include tobacco, corn, soybean, and rice cells.

[0358] One or more replicable expression vectors containing DNA encoding an antibody variable and/or constant region may be prepared and used to transform an appropriate cell line, for example, a non-producing myeloma cell line, such as a mouse NSO line or a bacteria, such as E. coli, in which production of the antibody will occur. In order to obtain efficient transcription and translation, the DNA sequence in each vector should include appropriate regulatory sequences, particularly a promoter and leader sequence operatively linked to the variable domain sequence. Particular methods for producing antibodies in this way are generally well-known and routinely used. For example, basic molecular biology procedures are described by Maniatis et al. (Molecular Cloning, A Laboratory Manual, 2nd ed., Cold Spring Harbor Laboratory, New York, 1989; see also Maniatis et al, 3rd ed., Cold Spring Harbor Laboratory, New York, (2001)). DNA sequencing can be performed as described in Sanger et al. (PNAS 74:5463, (1977)) and the Amersham International plc sequencing handbook, and site directed mutagenesis can be carried out according to methods known in the art (Kramer et al., Nucleic Acids Res. 12:9441, (1984); Kunkel Proc. Natl. Acad. Sci. USA 82:488-92 (1985); Kunkel et al., Methods in Enzymol. 154:367-82 (1987); the Anglian Biotechnology Ltd. handbook). Additionally, numerous publications describe techniques suitable for the preparation of antibodies by manipulation of DNA, creation of expression vectors, and transformation and culture of appropriate cells (Mountain A and Adair, J R in Biotechnology and Genetic Engineering Reviews (ed. Tombs, M P, 10, Chapter 1, 1992, Intercept, Andover, UK); “Current Protocols in Molecular Biology”, 1999, F. M. Ausubel (ed.), Wiley Interscience, New York).

[0359] Where it is desired to improve the affinity of antibodies according to the disclosure containing one or more of the above-mentioned CDRs can be obtained by a number of affinity maturation protocols including maintaining the CDRs (Yang et al., J. Mol. Biol., 254, 392-403, 1995), chain shuffling (Marks et al., Bio/Technology, 10, 779-783, 1992), use of mutation strains of E. coli. (Low et al., J. Mol. Biol., 250, 350-368, 1996), DNA shuffling (Patten et al., Curr. Opin. Biotechnol., 8, 724-733, 1997), phage display (Thompson et al., J. Mol. Biol., 256, 7-88, 1996) and sexual PCR (Crameri, et al., Nature, 391, 288-291, 1998). All of these methods of affinity maturation are discussed by Vaughan et al. (Nature Biotech., 16, 535-539, 1998).

[0360] It will be understood by one skilled in the art that some proteins, such as antibodies, may undergo a variety of posttranslational modifications. The type and extent of these modifications often depends on the host cell line used to express the protein as well as the culture conditions. Such modifications may include variations in glycosylation, methionine oxidation, diketopiperizine formation, aspartate isomerization and asparagine deamidation. A frequent modification is the loss of a carboxy-terminal basic residue (such as lysine or arginine) due to the action of carboxypeptidases (as described in Harris, R. J. Journal of Chromatography 705:129-134, 1995).

### 7.7. Sequences

[0361] Antibodies A1-A28 comprise heavy and light chain V(J)D polynucleotides (also referred to herein as L1-L28 and H1-H28, respectively). Antibodies A1-A28 comprise the sequences listed in TABLE 5. For example, antibody A1 comprises light chain L1 (SEQ ID NO:1) and heavy chain H1 (SEQ ID NO:101). CDR sequences in the light chain (L1-L28) and heavy chain (H1-H28) are also provided with a specific SEQ ID NOs. For example, three CDR sequences (CDR1, CDR 2 and CDR3) for L1 are CDR1-L1 (SEQ ID NO:1001), CDR2-L1 (SEQ ID NO:2001) and CDR3-L1 (SEQ ID NO:3001), respectively and three CDR sequences (CDR1, CDR 2 and CDR3) for H1 are CDR1-H1 (SEQ ID NO:4001), CDR2-H1 (SEQ ID NO:5001) and CDR3-H1 (SEQ ID NO:6001).

TABLE 5

| Antibodies | Light Chain | Heavy Chain |
|---|---|---|
| A1 | L1 (SEQ ID NO: 1) | H1 (SEQ ID NO: 101) |
| | L1 comprises CDR1-L1 (SEQ ID NO: 1001), | H1 comprises CDR1-H1 (SEQ ID NO: |
| | CDR2-L1 (SEQ ID NO: 2001) and CDR3-L1 | 4001), CDR2-H1 (SEQ ID NO: 5001) and |
| | (SEQ ID NO: 3001) | CDR3-H1 (SEQ ID NO: 6001) |
| A2 | L2 (SEQ ID NO: 2) | H2 (SEQ ID NO: 102) |
| | L2 comprises CDR1-L2 (SEQ ID NO: 1002), | He comprises CDR1-H2 (SEQ ID NO: |
| | CDR2-L2 (SEQ ID NO: 2002) and CDR3-L2 | 4002), CDR2-H2 (SEQ ID NO: 5002) and |
| | (SEQ ID NO: 3002) | CDR3-H2 (SEQ ID NO: 6002) |
| A3 | L3 (SEQ ID NO: 3) | H3 (SEQ ID NO: 103) |
| | L3 comprises CDR1-L3 (SEQ ID NO: 1003), | H3 comprises CDR1-H3 (SEQ ID NO: 4003), |
| | CDR2-L3 (SEQ ID NO: 2003) and CDR3-L3 | CDR2-H3 (SEQ ID NO: 5003) and CDR3- |
| | (SEQ ID NO: 3003) | H3 (SEQ ID NO: 6003) |
| A4 | L4 (SEQ ID NO: 4) | H4 (SEQ ID NO: 104) |
| | L4 comprises CDR1-L4 (SEQ ID NO: 1004), | H4 comprises CDR1-H4 (SEQ ID NO: 4004), |
| | CDR2-L4 (SEQ ID NO: 2004) and CDR3-L4 | CDR2-H4 (SEQ ID NO: 5004) and CDR3- |
| | (SEQ ID NO: 3004) | H4 (SEQ ID NO: 6004) |
| A5 | L5 (SEQ ID NO: 5) | H5 (SEQ ID NO: 105) |
| | L5 comprises CDR1-L5 (SEQ ID NO: 1005), | H4 comprises CDR1-H5 (SEQ ID NO: 4005), |
| | CDR2-L5 (SEQ ID NO: 2005) and CDR3-L5 | CDR2-H5 (SEQ ID NO: 5005) and CDR3- |
| | (SEQ ID NO: 3005) | H5 (SEQ ID NO: 6005) |
| A6 | L6 (SEQ ID NO: 6) | H6 (SEQ ID NO: 106) |
| | L6 comprises CDR1-L6 (SEQ ID NO: 1006), | H6 comprises CDR1-H6 (SEQ ID NO: 4006), |
| | CDR2-L6 (SEQ ID NO: 2006) and CDR3-L6 | CDR2-H6 (SEQ ID NO: 5006) and CDR3- |
| | (SEQ ID NO: 3006) | H6 (SEQ ID NO: 6006) |
| A7 | L7 (SEQ ID NO: 7) | H7 (SEQ ID NO: 107) |
| | L7 comprises CDR1-L7 (SEQ ID NO: 1007), | H7 comprises CDR1-H7 (SEQ ID NO: 4007), |
| | CDR2-L7 (SEQ ID NO: 2007) and CDR3-L7 | CDR2-H7 (SEQ ID NO: 5007) and CDR3- |
| | (SEQ ID NO: 3007) | H7 (SEQ ID NO: 6007) |
| A8 | L8 (SEQ ID NO: 8) | H8 (SEQ ID NO: 108) |
| | L8 comprises CDR1-L8 (SEQ ID NO: 1008), | H8 comprises CDR1-H8 (SEQ ID NO: 4008), |
| | CDR2-L8 (SEQ ID NO: 2008) and CDR3-L6 | CDR2-H8 (SEQ ID NO: 5008) and CDR3- |
| | (SEQ ID NO: 3008) | H8 (SEQ ID NO: 6008) |
| A9 | L9 (SEQ ID NO: 9) | H9 (SEQ ID NO: 109) |
| | L9 comprises CDR1-L9 (SEQ ID NO: 1009), | H9 comprises CDR1-H9 (SEQ ID NO: 4009), |
| | CDR2-L9 (SEQ ID NO: 2009) and CDR3-L9 | CDR2-H9 (SEQ ID NO: 5009) and CDR3- |
| | (SEQ ID NO: 3009) | H9 (SEQ ID NO: 6009) |
| A10 | L10 (SEQ ID NO: 10) | H10 (SEQ ID NO: 110) |
| | L10 comprises CDR1-L10 (SEQ ID | H10 comprises CDR1-H10 (SEQ ID |
| | NO: 1010), CDR2-L10 (SEQ ID NO: 2010) | NO: 4010), CDR2-H10 (SEQ ID NO: 5010) |
| | and CDR3-L10 (SEQ ID NO: 3010) | and CDR3-H10 (SEQ ID NQ:6010) |
| A11 | L11 (SEQ ID NO: 11) | H11 (SEQ ID NO: 111) |
| | L11 comprises CDR1-L11 (SEQ ID | H11 comprises CDR1-H11 (SEQ ID |
| | NO: 1011), CDR2-L11 (SEQ ID NO: 2011) | NO: 4011), CDR2-H11 (SEQ ID NO: 5011) |
| | and CDR3-L11 (SEQ ID NO: 3011) | and CDR3-H11 (SEQ ID NO: 6011) |
| A12 | L12 (SEQ ID NO: 12) | H12 (SEQ ID NO: 112) |
| | L12 comprises CDR1-L12 (SEQ ID | H12 comprises CDR1-H12 (SEQ ID |
| | NO: 1012), CDR2-L12 (SEQ ID NO: 2012) | NO: 4012), CDR2-H12 (SEQ ID NO: 5012) |
| | and CDR3-L12 (SEQ ID NO: 3012) | and CDR3-H12 (SEQ ID NO: 6012) |
| A13 | L13 (SEQ ID NO: 13) | H13 (SEQ ID NO: 113) |
| | L13 comprises CDR1-L13 (SEQ ID | H13 comprises CDR1-H13 (SEQ ID |
| | NO: 1013), CDR2-L13 (SEQ ID NO: 2013) | NO: 4013), CDR2-H13 (SEQ ID NO: 5013) |
| | and CDR3-L13 (SEQ ID NO: 3013) | and CDR3-H13 (SEQ ID NO: 6013) |
| A14 | L14 (SEQ ID NO: 14) | H14 (SEQ ID NO: 114) |
| | L14 comprises CDR1-L14 (SEQ ID | H14 comprises CDR1-H14 (SEQ ID |
| | NO: 1014), CDR2-L14 (SEQ ID NO: 2014) | NO: 4014), CDR2-H14 (SEQ ID NO: 5014) |
| | and CDR3-L14 (SEQ ID NO: 3014) | and CDR3-H14 (SEQ ID NO: 6014) |
| A15 | L15 (SEQ ID NO: 15) | H15 (SEQ ID NO: 115) |
| | L15 comprises CDR1-L15 (SEQ ID | H15 comprises CDR1-H15 (SEQ ID |
| | NO: 1015), CDR2-L15 (SEQ ID NO: 2015) | NO: 4015), CDR2-H15 (SEQ ID NO: 5015) |
| | and CDR3-L15 (SEQ ID NO: 3015) | and CDR3-H15 (SEQ ID NO: 6015) |
| A16 | L16 (SEQ ID NO: 16) | H16 (SEQ ID NO: 116) |
| | L16 comprises CDR1-L16 (SEQ ID | H16 comprises CDR1-H16 (SEQ ID |
| | NO: 1016), CDR2-L16 (SEQ ID NO: 2016) | NO: 4016), CDR2-H16 (SEQ ID NO: 5016) |
| | and CDR3-L16 (SEQ ID NO: 3016) | and CDR3-H16 (SEQ ID NO: 6016) |
| A17 | L17 (SEQ ID NO: 17) | H17 (SEQ ID NO: 117) |
| | L17 comprises CDR1-L17 (SEQ ID | H17 comprises CDR1-H17 (SEQ ID |
| | NO: 1017), CDR2-L17 (SEQ ID NO: 2017) | NO: 4017), CDR2-H17 (SEQ ID NO: 5017) |
| | and CDR3-L17 (SEQ ID NO: 3017) | and CDR3-H17 (SEQ ID NO: 6017) |
| A18 | L18 (SEQ ID NO: 18) | H18 (SEQ ID NO: 118) |
| | L18 comprises CDR1-L18 (SEQ ID | H18 comprises CDR1-H18 (SEQ ID |
| | NO: 1018), CDR2-L18 (SEQ ID NO: 2018) | NO: 4018), CDR2-H18 (SEQ ID NO: 5018) |
| | and CDR3-L18 (SEQ ID NO: 3018) | and CDR3-H18 (SEQ ID NO: 6018) |
| A19 | L19 (SEQ ID NO: 19) | H19 (SEQ ID NO: 119) |
| | L19 comprises CDR1-L19 (SEQ ID | H19 comprises CDR1-H19 (SEQ ID |
| | NO: 1019), CDR2-L19 (SEQ ID NO: 2019) | NO: 4019), CDR2-H19 (SEQ ID NO: 5019) |
| | and CDR3-L19 (SEQ ID NO: 3019) | and CDR3-H19 (SEQ ID NO: 6019) |
| A20 | L20 (SEQ ID NO: 20) | H20 (SEQ ID NO: 120) |
| | L20 comprises CDR1-L20 (SEQ ID | H20 comprises CDR1-H20 (SEQ ID |
| | NO: 1020), CDR2-L20 (SEQ ID NO: 2020) | NO: 4020), CDR2-H20 (SEQ ID NO: 5020) |
| | and CDR3-L20 (SEQ ID NO: 3020) | and CDR3-H20 (SEQ ID NO: 6020) |
| A21 | L21 (SEQ ID NO: 21) | H21 (SEQ ID NO: 121) |
| | L21 comprises CDR1-L21 (SEQ ID | H21 comprises CDR1-H21 (SEQ ID |
| | NO: 1021), CDR2-L21 (SEQ ID NO: 2021) | NO: 4021), CDR2-H21 (SEQ ID NO: 5021) |
| | and CDR3-L21 (SEQ ID NO: 3021) | and CDR3-H21 (SEQ ID NO: 6021) |
| A22 | L22 (SEQ ID NO: 22) | H22 (SEQ ID NO: 122) |
| | L22 comprises CDR1-L22 (SEQ ID | H22 comprises CDR1-H22 (SEQ ID |
| | NO: 1022), CDR2-L22 (SEQ ID NO: 2022) | NO: 4022), CDR2-H22 (SEQ ID NO: 5022) |
| | and CDR3-L22 (SEQ ID NO: 3022) | and CDR3-H22 (SEQ ID NO: 6022) |
| A23 | L23 (SEQ ID NO: 23) | H23 (SEQ ID NO: 123) |
| | L23 comprises CDR1-L23 (SEQ ID | H23 comprises CDR1-H23 (SEQ ID |
| | NO: 1023), CDR2-L23 (SEQ ID NO: 2023) | NO: 4023), CDR2-H23 (SEQ ID NO: 5023) |
| | and CDR3-L23 (SEQ ID NO: 3023) | and CDR3-H23 (SEQ ID NO: 6023) |
| A24 | L24 (SEQ ID NO: 24) | H24 (SEQ ID NO: 124) |
| | L24 comprises CDR1-L24 (SEQ ID | H24 comprises CDR1-H24 (SEQ ID |
| | NO: 1024), CDR2-L24 (SEQ ID NO: 2024) | NO: 4024), CDR2-H24 (SEQ ID NO: 5024) |
| | and CDR3-L24 (SEQ ID NO: 3024) | and CDR3-H24 (SEQ ID NO: 6024) |
| A25 | L25 (SEQ ID NO: 25) | H25 (SEQ ID NO: 125) |
| | L25 comprises CDR1-L25 (SEQ ID | H25 comprises CDR1-H25 (SEQ ID |
| | NO: 1025), CDR2-L25 (SEQ ID NO: 2025) | NO: 4025), CDR2-H25 (SEQ ID NO: 5025) |
| | and CDR3-L25 (SEQ ID NO: 3025) | and CDR3-H25 (SEQ ID NO: 6025) |
| A26 | L26 (SEQ ID NO: 26) | H26 (SEQ ID NO: 126) |
| | L26 comprises CDR1-L26 (SEQ ID | H26 comprises CDR1-H26 (SEQ ID |
| | NO: 1026), CDR2-L26 (SEQ ID NO: 2026) | NO: 4026), CDR2-H26 (SEQ ID NO: 5026) |
| | and CDR3-L26 (SEQ ID NO: 3026) | and CDR3-H26 (SEQ ID NO: 6026) |
| A27 | L27 (SEQ ID NO: 27) | H27 (SEQ ID NO: 127) |
| | L27 comprises CDR1-L27 (SEQ ID | H27 comprises CDR1-H27 (SEQ ID |
| | NO: 1027), CDR2-L27 (SEQ ID NO: 2027) | NO: 4027), CDR2-H27 (SEQ ID NO: 5027) |
| | and CDR3-L27 (SEQ ID NO: 3027) | and CDR3-H27 (SEQ ID NO: 6027) |
| A28 | L28 (SEQ ID NO: 28) | H28 (SEQ ID NO: 128) |
| | L28 comprises CDR1-L28 (SEQ ID | H28 comprises CDR1-H28 (SEQ ID |
| | NO: 1028), CDR2-L28 (SEQ ID NO: 2028) | NO: 4028), CDR2-H28 (SEQ ID NO: 5028) |
| | and CDR3-L28 (SEQ ID NO: 3028) | and CDR3-H28 (SEQ ID NO: 6028) |

### 7.8. Pharmaceutical Compositions

[0362] Pharmaceutical compositions containing the proteins and polypeptides of the present disclosure are also provided. Specifically, the present disclosure provides a pharmaceutical composition comprising anti-CTLA ABP. In some embodiments, the pharmaceutical composition comprises GIGA-564. In some embodiments, the pharmaceutical composition comprises GIGA-2328. Such compositions comprise a therapeutically or prophylactically effective amount of the polypeptide or protein in a mixture with pharmaceutically acceptable materials, and physiologically acceptable formulation materials.

[0363] The pharmaceutical composition may contain formulation materials for modifying, maintaining or preserving, for example, the pH, osmolarity, viscosity, clarity, color, isotonicity, odor, sterility, stability, rate of dissolution or release, adsorption or penetration of the composition.

[0364] Suitable formulation materials include, but are not limited to, amino acids (such as glycine, glutamine, asparagine, arginine or lysine); antimicrobials; antioxidants (such as ascorbic acid, sodium sulfite or sodium hydrogen-sulfite); buffers (such as borate, bicarbonate, Tris-HCl, citrates, phosphates, other organic acids); bulking agents (such as mannitol or glycine), chelating agents (such as ethylenediamine tetraacetic acid (EDTA)); complexing agents (such as caffeine, polyvinylpyrrolidone, beta-cyclodextrin or hydroxypropyl-beta-cyclodextrin); fillers; monosaccharides; disaccharides and other carbohydrates (such as glucose, mannose, or dextrins); proteins (such as serum albumin, gelatin or immunoglobulins); coloring; flavoring and diluting agents; emulsifying agents; hydrophilic polymers (such as polyvinylpyrrolidone); low molecular weight polypeptides; salt-forming counterions (such as sodium); preservatives (such as benzalkonium chloride, benzoic acid, salicylic acid, thimerosal, phenethyl alcohol, methylparaben, propylparaben, chlorhexidine, sorbic acid or hydrogen peroxide); solvents (such as glycerin, propylene glycol or polyethylene glycol); sugar alcohols (such as mannitol or sorbitol); suspending agents; surfactants or wetting agents (such as pluronics, PEG, sorbitan esters, polysorbates such as polysorbate 20, polysorbate 80, triton, tromethamine, lecithin, cholesterol, tyloxapal); stability enhancing agents (sucrose or sorbitol); tonicity enhancing agents (such as alkali metal halides (preferably sodium or potassium chloride, mannitol sorbitol); delivery vehicles; diluents; excipients and/or pharmaceutical adjuvants. Neutral buffered saline or saline mixed with conspecific serum albumin are examples of appropriate diluents. In accordance with appropriate industry standards, preservatives such as benzyl alcohol may also be added. The composition may be formulated as a lyophilizate using appropriate excipient solutions (e.g., sucrose) as diluents. Suitable components are nontoxic to recipients at the dosages and concentrations employed. Further examples of components that may be employed in pharmaceutical formulations are presented in Remington's Pharmaceutical Sciences, 16^{th} Ed. (1980) and 20^{th} Ed. (2000), Mack Publishing Company, Easton, Pa.

[0365] In some embodiments, less than 50% of the ABP in the pharmaceutical composition is fucosylated. In some embodiments, less than 40% of the ABP in the pharmaceutical composition is fucosylated. In some embodiments, less than 30% of the ABP in the pharmaceutical composition is fucosylated. In some embodiments, less than 20% of the ABP in the pharmaceutical composition is fucosylated. In some embodiments, less than 10% of the ABP in the pharmaceutical composition is fucosylated.

[0366] In some embodiments, more than 99% of the ABP in the pharmaceutical composition is fucosylated. In some embodiments, more than 95% of the ABP in the pharmaceutical composition is fucosylated. In some embodiments, more than 90% of the ABP in the pharmaceutical composition is fucosylated. In some embodiments, more than 85% of the ABP in the pharmaceutical composition is fucosylated. In some embodiments, more than 80% of the ABP in the pharmaceutical composition is fucosylated. In some embodiments, more than 75% of the ABP in the pharmaceutical composition is fucosylated. In some embodiments, more than 70% of the ABP in the pharmaceutical composition is fucosylated. In some embodiments, more than 65% of the ABP in the pharmaceutical composition is fucosylated. In some embodiments, more than 60% of the ABP in the pharmaceutical composition is fucosylated. In some embodiments, more than 50% of the ABP in the pharmaceutical composition is fucosylated. In some embodiments, more than 40% of the ABP in the pharmaceutical composition is fucosylated. In some embodiments, more than 30% of the ABP in the pharmaceutical composition is fucosylated. In some embodiments, more than 20% of the ABP in the pharmaceutical composition is fucosylated. In some embodiments, more than 10% of the ABP in the pharmaceutical composition is fucosylated.

[0367] In some embodiments, 30-70% of the ABP in the pharmaceutical composition is fucosylated. In some embodiments, 20-50% of the ABP in the pharmaceutical composition is fucosylated. In some embodiments, 10-40% of the ABP in the pharmaceutical composition is fucosylated. In some embodiments, 10-30% of the ABP in the pharmaceutical composition is fucosylated. In some embodiments, 5-20% of the ABP in the pharmaceutical composition is fucosylated. In some embodiments, 1-10% of the ABP in the pharmaceutical composition is fucosylated.

[0368] In some embodiments, the pharmaceutical formulation materials include one or more of histidine buffer, citrate buffer, sucrose, sodium chloride, succinate, polysorbate 20, and polysorbate-80. In certain embodiments, the pharmaceutical formulation comprises 1-20 mM of histidine or citrate buffer. In certain embodiments, the pharmaceutical formulation comprises 100-350 mM of sucrose. In certain embodiments, the pharmaceutical formulation comprises 0-75 mM of sucrose. In certain embodiments, the pharmaceutical formulation comprises 0.002 to 0.1% by weight of polysorbate-20. In certain embodiments, the pharmaceutical formulation comprises 0.002 to 0.1% by weight of polysorbate-80. In certain embodiments, the pharmaceutical formulation material include 20 mM of citrate or histidine, 170 to 270 mM of sucrose, 0 to 50 mM of sodium chloride, and 0.02% by weight of polysorbate-20. In certain embodiments, the pharmaceutical formulation material include 20 mM of citrate or histidine, 170 to 270 mM of sucrose, 0 to 50 mM of sodium chloride, and 0.02% by weight of polysorbate-80.

[0369] In some embodiments, the pharmaceutical composition has a pH from 5.0 to 6.5. In some embodiments, the pharmaceutical composition has a pH from 5.5 to 6.5.

[0370] In some embodiments, the pharmaceutical composition comprises 20 mM of histidine or citrate buffer.

[0371] In some embodiments, the pharmaceutical composition comprises 50 mM of NaCl.

[0372] In some embodiments, the pharmaceutical composition comprises sucrose at a concentration from 170 mM to 270 mM.

[0373] In some embodiments, the pharmaceutical composition comprises 170 mM or 270 mM of sucrose.

[0374] In some embodiments, the pharmaceutical composition comprises 20 mg/mL of the ABP. In some embodiments, the pharmaceutical composition comprises 5 mg/mL of the ABP. In some embodiments, the pharmaceutical composition comprises 5 mg/mL to 20 mg/mL of the ABP.

[0375] In some embodiments, the pharmaceutical composition comprises trehalose.

[0376] In some embodiments, the pharmaceutical composition comprises about 0.04 to 30 mg/ml of the ABP, 0.9% Sodium Chloride Injection, USP or 5% Dextrose Injection, USP.

[0377] In some embodiments, the ABP is formulated at a concentration of 1 mg/ml to 80 mg/ml. In certain embodiments, the ABP is formulated at a concentration of 5 mg/ml to 20 mg/ml.

[0378] In some embodiments, the pharmaceutical composition comprises a pH of about 5 to 7. In some embodiments, the pharmaceutical formulation comprises a pH of about 5.0 to 6.5. In some embodiments, the pharmaceutical formulation comprises a pH of about 5.0, 5.5, 5.6, 5.7, 5.8, 5.9, 6.0, 6.1, 6.2, 6.3, 6.4, 6.5, 6.6, 6.7, 6.8, 6.9, or 7.

[0379] Optionally, the composition additionally comprises one or more physiologically active agents, for example, an anti-angiogenic substance, a chemotherapeutic substance (such as capecitabine, 5-fluorouracil, or doxorubicin), an analgesic substance, etc., non-exclusive examples of which are provided herein. In various particular embodiments, the composition comprises one, two, three, four, five, or six physiologically active agents in addition to a CTLA-4-binding protein.

[0380] In another embodiment of the present disclosure, the compositions disclosed herein may be formulated in a neutral or salt form. Illustrative pharmaceutically-acceptable salts include the acid addition salts (formed with the free amino groups of the protein) and which are formed with inorganic acids such as, for example, hydrochloric or phosphoric acids, or such organic acids as acetic, oxalic, tartaric, mandelic, and the like. Salts formed with the free carboxyl groups can also be derived from inorganic bases such as, for example, sodium, potassium, ammonium, calcium, or ferric hydroxides, and such organic bases as isopropylamine, trimethylamine, histidine, procaine and the like. Upon formulation, solutions will be administered in a manner compatible with the dosage formulation and in such amount as is therapeutically effective.

[0381] The carriers can further comprise any and all solvents, dispersion media, vehicles, coatings, diluents, antibacterial and antifungal agents, isotonic and absorption delaying agents, buffers, carrier solutions, suspensions, colloids, and the like. The use of such media and agents for pharmaceutical active substances is well known in the art. Except insofar as any conventional media or agent is incompatible with the active ingredient, its use in the therapeutic compositions is contemplated. Supplementary active ingredients can also be incorporated into the compositions. The phrase “pharmaceutically-acceptable” refers to molecular entities and compositions that do not produce an allergic or similar untoward reaction when administered to a human.

[0382] The optimal pharmaceutical composition will be determined by one skilled in the art depending upon, for example, the intended route of administration, delivery format, and desired dosage. See for example, Remington's Pharmaceutical Sciences, supra. Such compositions may influence the physical state, stability, rate of in vivo release, and rate of in vivo clearance of the polypeptide. For example, suitable compositions may be water for injection, physiological saline solution for parenteral administration.

[0383] 7.8.1. Content of Pharmaceutically Active Ingredient

[0384] In typical embodiments, the active ingredient (i.e., the proteins and polypeptides, ABP, of the present disclosure) is present in the pharmaceutical composition at a concentration of at least 0.01 mg/ml, at least 0.005 mg/ml, at least 0.004 mg/ml, at least 0.05 mg/ml, 0.04 mg/ml, 0.1 mg/ml, at least 0.5 mg/ml, or at least 1 mg/ml. In certain embodiments, the active ingredient is present in the pharmaceutical composition at a concentration of at least 1 mg/ml, 2 mg/ml, 3 mg/ml, 4 mg/ml, 5 mg/ml, 10 mg/ml, 15 mg/ml, 20 mg/ml, 25 mg/ml, or 30 mg/ml. In certain embodiments, the active ingredient is present in the pharmaceutical composition at a concentration of at least 20 mg/ml, 25 mg/ml, 30 mg/ml, 35 mg/ml, 40 mg/ml, 45 mg/ml, 50 mg/ml, 55 mg/ml, 60 mg/ml, 65 mg/ml, 70 mg/ml, 75 mg/ml, 80 mg/ml, 85 mg/ml, 90 mg/ml, 95 mg/ml, or 100 mg/ml. In certain embodiments, the active ingredient is present in the pharmaceutical composition at a concentration ranging from 1 mg/ml to 80 mg/ml. In certain embodiments, the active ingredient is present in the pharmaceutical composition at a concentration ranging from 5 mg/ml to 20 mg/ml. In certain embodiments, the active ingredient is present in the pharmaceutical composition at a concentration ranging from 0.04 mg/ml to 30 mg/ml.

[0385] In some embodiments, the pharmaceutical composition comprises one or more additional active ingredients in addition to the proteins or polypeptides of the present disclosure. The one or more additional active ingredients can be a drug targeting a different check-point receptor, such as PD-1 inhibitor (e.g., anti-PD-1 antibody), PD-L1 inhibitor, LAG-3 inhibitor, CD47 inhibitor, or TIGIT inhibitor (e.g., anti-TIGIT antibody).

[0386] 7.8.2. Formulation Generally

[0387] The pharmaceutical composition can be in any form appropriate for human or veterinary medicine, including a liquid, an oil, an emulsion, a gel, a colloid, an aerosol or a solid.

[0388] The pharmaceutical composition can be formulated for administration by any route of administration appropriate for human or veterinary medicine, including enteral and parenteral routes of administration.

[0389] In various embodiments, the pharmaceutical composition is formulated for administration by inhalation. In certain of these embodiments, the pharmaceutical composition is formulated for administration by a vaporizer. In certain of these embodiments, the pharmaceutical composition is formulated for administration by a nebulizer. In certain of these embodiments, the pharmaceutical composition is formulated for administration by an aerosolizer.

[0390] In various embodiments, the pharmaceutical composition is formulated for oral administration, for buccal administration, or for sublingual administration.

[0391] In some embodiments, the pharmaceutical composition is formulated for intravenous, intramuscular, or subcutaneous administration.

[0392] In some embodiments, the pharmaceutical composition is formulated for intrathecal or intracerebroventricular administration.

[0393] In some embodiments, the pharmaceutical composition is formulated for an infusion.

[0394] 7.8.3. Pharmacological Compositions Adapted for Injection

[0395] For intravenous, cutaneous or subcutaneous injection, or injection at the site of affliction, the active ingredient will be in the form of a parenterally acceptable aqueous solution which is pyrogen-free and has suitable pH, isotonicity and stability. Those of relevant skill in the art are well able to prepare suitable solutions using, for example, isotonic vehicles such as Sodium Chloride Injection, Ringer's Injection, Lactated Ringer's Injection. Preservatives, stabilisers, buffers, antioxidants and/or other additives can be included, as required.

[0396] In various embodiments, the unit dosage form is a vial, ampule, bottle, or pre-filled syringe. In some embodiments, the unit dosage form contains 0.005 mg, 0.05 mg, 0.01 mg, 0.1 mg, 0.5 mg, 1 mg, 2.5 mg, 5 mg, 10 mg, 12.5 mg, 25 mg, 50 mg, 75 mg, or 100 mg of the pharmaceutical composition. In some embodiments, the unit dosage form contains 125 mg, 150 mg, 175 mg, or 200 mg of the pharmaceutical composition. In some embodiments, the unit dosage form contains 250 mg of the pharmaceutical composition.

[0397] In typical embodiments, the pharmaceutical composition in the unit dosage form is in liquid form. In various embodiments, the unit dosage form contains between 0.1 mL and 50 ml of the pharmaceutical composition. In some embodiments, the unit dosage form contains 1 ml, 2.5 ml, 5 ml, 7.5 ml, 10 ml, 25 ml, or 50 ml of pharmaceutical composition.

[0398] In particular embodiments, the unit dosage form is a vial containing 1 ml of the pharmaceutical composition at a concentration of 0.01 mg/ml, 0.1 mg/ml, 0.5 mg/ml, or 1 mg/ml. In some embodiments, the unit dosage form is a vial containing 2 ml of the pharmaceutical composition at a concentration of 0.01 mg/ml, 0.1 mg/ml, 0.5 mg/ml, or 1 mg/ml. In some embodiments, the unit dosage form is a vial containing a 1 to 150 ml of the pharmaceutical composition at a concentration of 0.01 mg/ml, 0.1 mg/ml, 0.5 mg/ml, 1 mg/ml, 2 mg/ml, 3 mg/ml, 4 mg/ml, 5 mg/ml, 10 mg/ml, 15 mg/ml, 20 mg/ml, 25 mg/ml, 30 mg/ml, 35 mg/ml, 40 mg/ml, 45 mg/ml, 50 mg/ml, 55 mg/ml, 60 mg/ml, 65 mg/ml, 70 mg/ml, 75 mg/ml, 80 mg/ml, 85 mg/ml, 90 mg/ml, 95 mg/ml, or 100 mg/ml. In some embodiments, the unit dosage form is a vial containing a 1 to 150 ml of the pharmaceutical composition at a concentration of 0.01-0.1 mg/ml, 0.1-0.5 mg/ml, 0.5-1 mg/ml, 1-10 mg/ml, 1-50 mg/ml, 10-50 mg/ml, 10-100 mg/ml, 50-100 mg/ml, or 50-200 mg/ml.

[0399] In some embodiments, the pharmaceutical composition in the unit dosage form is in solid form, such as a lyophilate, suitable for solubilization.

[0400] Unit dosage form embodiments suitable for subcutaneous, intradermal, or intramuscular administration include preloaded syringes, auto-injectors, and autoinject pens, each containing a predetermined amount of the pharmaceutical composition described hereinabove.

[0401] In various embodiments, the unit dosage form is a preloaded syringe, comprising a syringe and a predetermined amount of the pharmaceutical composition. In certain preloaded syringe embodiments, the syringe is adapted for subcutaneous administration. In certain embodiments, the syringe is suitable for self-administration. In particular embodiments, the preloaded syringe is a single use syringe.

[0402] In various embodiments, the preloaded syringe contains about 0.1 mL to about 0.5 mL of the pharmaceutical composition. In certain embodiments, the syringe contains about 0.5 mL of the pharmaceutical composition. In specific embodiments, the syringe contains about 1.0 mL of the pharmaceutical composition. In particular embodiments, the syringe contains about 2.0 mL of the pharmaceutical composition.

[0403] In certain embodiments, the unit dosage form is an autoinject pen. The autoinject pen comprises an autoinject pen containing a pharmaceutical composition as described herein. In some embodiments, the autoinject pen delivers a predetermined volume of pharmaceutical composition. In other embodiments, the autoinject pen is configured to deliver a volume of pharmaceutical composition set by the user.

[0404] In various embodiments, the autoinject pen contains about 0.1 mL to about 5.0 mL of the pharmaceutical composition. In specific embodiments, the autoinject pen contains about 0.5 mL of the pharmaceutical composition. In particular embodiments, the autoinject pen contains about 1.0 mL of the pharmaceutical composition. In other embodiments, the autoinject pen contains about 5.0 mL of the pharmaceutical composition.

### 7.9. Dosage Regimens

[0405] In some embodiments, the ABP is administered at a dose sufficient to produce a therapeutic effect.

[0406] In various embodiments, the ABP is administered using a weight based dose. In some embodiments, the ABP is administered in an amount of at least 0.05 mg/kg. In some embodiments, the ABP is administered in an amount of at least 0.01 mg/kg. In some embodiments, the ABP is administered in an amount of at least 0.1 mg/kg. In some embodiments, the ABP is administered in an amount of at least 0.5 mg/kg. In certain embodiments, the ABP is administered orally in an amount of at least 1 mg/kg. In certain embodiments, the dose is at least 2 mg/kg, at least 3 mg/kg, at least 4 mg/kg, at least 5 mg/kg, at least 6 mg/kg, at least 7 mg/kg, at least 8 mg/kg, at least 9 mg/kg, or at least 10 mg/kg.

[0407] In various embodiments, the dose of the ABP is at least 10 mg/kg. In certain embodiments, the dose is at least 15 mg/kg, at least 20 mg/kg, at least 25 mg/kg, 30 mg/kg, at least 35 mg/kg, at least 40 mg/kg, at least 45 mg/kg, at least 50 mg/kg, at least 55 mg/kg, at least 60 mg/kg, at least 65 mg/kg, at least 70 mg/kg, at least 75 mg/kg, at least 80 mg/kg, at least 85 mg/kg, at least 90 mg/kg, at least 95 mg/kg, at least 100 mg/kg, at least 150 mg/kg, at least 175 mg/kg, or at least 200 mg/kg. In certain embodiments, the dose is 250 mg/kg, 300 mg/kg, 350 mg/kg, 400 mg/kg, 450 mg/kg, 500 mg/kg, 600 mg/kg, 650 mg/kg, 700 mg/kg, 750 mg/kg, 800 mg/kg, 850 mg/kg, 900 mg/kg, 950 mg/kg, or 1000 mg/kg. In certain embodiments, the dose is 0.5 mg/kg to 100 mg/kg per day. In certain embodiments, the dose is 2 mg/kg to 100 mg/kg per day. In certain embodiments, the dose is 25 mg/kg to 1000 mg/kg per day.

### 7.10. Unit Dosage Forms

[0408] The pharmaceutical compositions may conveniently be presented in unit dosage form.

[0409] The unit dosage form will typically be adapted to one or more specific routes of administration of the pharmaceutical composition.

[0410] In various embodiments, the unit dosage form is adapted for administration by inhalation. In certain of these embodiments, the unit dosage form is adapted for administration by a vaporizer. In certain of these embodiments, the unit dosage form is adapted for administration by a nebulizer. In certain of these embodiments, the unit dosage form is adapted for administration by an aerosolizer.

[0411] In various embodiments, the unit dosage form is adapted for oral administration, for buccal administration, or for sublingual administration.

[0412] In some embodiments, the unit dosage form is adapted for intravenous, intramuscular, or subcutaneous administration.

[0413] In some embodiments, the unit dosage form is adapted for intrathecal or intracerebroventricular administration.

[0414] In some embodiments, the pharmaceutical composition is formulated for topical administration.

[0415] The amount of active ingredient which can be combined with a carrier material to produce a single dosage form will generally be that amount of the compound which produces a therapeutic effect.

### 7.11. Methods of Use

[0416] In one aspect, therapeutic antibodies may be used that specifically bind to intact CTLA-4.

[0417] In vivo and/or in vitro assays may optionally be employed to help identify optimal dosage ranges. The precise dose to be employed in the formulation will also depend on the route of administration, and the seriousness of the condition, and should be decided according to the judgment of the practitioner and each subject's circumstances. Effective doses may be extrapolated from dose-response curves derived from in vitro or animal model test systems.

[0418] An oligopeptide or polypeptide is within the scope of the present disclosure if it has an amino acid sequence that is at least 75%, 76%, 77%, 78%, 79%, 80%, 81%, 82%, 83%, 84%, 85%, 86%, 87%, 88%, 89%, 90%, 91%, 92%, 93%, 94%, 95%, 96%, 97%, 98% or 99% identical to least one of the CDRs provided herein; and/or to a CDR of a CTLA-4 binding agent that cross-blocks the binding of at least one of antibodies A1-A28 to CTLA-4, and/or is cross-blocked from binding to CTLA-4 by at least one of antibodies A1-A28; and/or to a CDR of a CTLA-4 binding agent wherein the binding agent can block the binding of CTLA-4 to its ligands.

[0419] CTLA-4 binding agent polypeptides and antibodies are within the scope of the present disclosure if they have amino acid sequences that are at least 85%, 86%, 87%, 88%, 89%, 90%, 91%, 92%, 93%, 94%, 95%, 96%, 97%, 98% or 99% identical to a variable region of at least one of antibodies A1-A28, and cross-block the binding of at least one of antibodies A1-A28 to CTLA-4, and/or are cross-blocked from binding to CTLA-4 by at least one of antibodies A1-A28; and/or can block the inhibitory effect of CTLA-4 on its ligands.

[0420] Antibodies according to the disclosure may have a binding affinity for human CTLA-4 of less than or equal to 5×10⁻⁷M, less than or equal to 1×10⁻⁷M, less than or equal to 0.5×10⁻⁷M, less than or equal to 1×10⁻⁸M, less than or equal to 1×10⁻⁹M, less than or equal to 1×10⁻¹⁰M, less than or equal to 1×10⁻¹¹M, or less than or equal to 1×10⁻¹² M.

[0421] The affinity of an antibody or binding partner, as well as the extent to which an antibody inhibits binding, can be determined by one of ordinary skill in the art using conventional techniques, for example those described by Scatchard et al. (Ann. N.Y. Acad. Sci. 51:660-672 (1949)) or by surface plasmon resonance (SPR; BIAcore, Biosensor, Piscataway, N.J.). For surface plasmon resonance, target molecules are immobilized on a solid phase and exposed to ligands in a mobile phase running along a flow cell. If ligand binding to the immobilized target occurs, the local refractive index changes, leading to a change in SPR angle, which can be monitored in real time by detecting changes in the intensity of the reflected light. The rates of change of the SPR signal can be analyzed to yield apparent rate constants for the association and dissociation phases of the binding reaction. The ratio of these values gives the apparent equilibrium constant (affinity) (see, e.g., Wolff et al., Cancer Res. 53:2560-65 (1993)).

[0422] An antibody according to the present disclosure may belong to any immunoglobin class, for example IgG, IgE, IgM, IgD, or IgA. It may be obtained from or derived from an animal, for example, fowl (e.g., chicken) and mammals, which includes but is not limited to a mouse, rat, hamster, rabbit, or other rodent, cow, horse, sheep, goat, camel, human, or other primate. The antibody may be an internalizing antibody. Production of antibodies is disclosed generally in U.S. Patent Publication No. 2004/0146888 A1.

[0423] In the methods described above to generate antibodies according to the disclosure, including the manipulation of the specific A1-A28 CDRs into new frameworks and/or constant regions, appropriate assays are available to select the desired antibodies (i.e. assays for determining binding affinity to CTLA-4; cross-blocking assays; Biacore-based competition binding assay;” in vivo assays).

[0424] 7.11.1. Methods of Treating a Disease Responsive to a CTLA-4 Inhibitor or Activator

[0425] In another aspect, methods are presented for treating a subject having a disease responsive to a CTLA-4 inhibitor or activator. The disease can be cancer, autoimmune disease, or viral or bacterial infection.

[0426] The terms “treatment,” “treating,” and the like are used herein to generally mean obtaining a desired pharmacologic and/or physiologic effect. The effect may be prophylactic, in terms of completely or partially preventing a disease, condition, or symptoms thereof, and/or may be therapeutic in terms of a partial or complete cure for a disease or condition and/or adverse effect, such as a symptom, attributable to the disease or condition. “Treatment” as used herein covers any treatment of a disease or condition of a mammal, particularly a human, and includes: (a) preventing the disease or condition from occurring in a subject which may be predisposed to the disease or condition but has not yet been diagnosed as having it; (b) inhibiting the disease or condition (e.g., arresting its development); or (c) relieving the disease or condition (e.g., causing regression of the disease or condition, providing improvement in one or more symptoms). Improvements in any conditions can be readily assessed according to standard methods and techniques known in the art. The population of subjects treated by the method of the disease includes subjects suffering from the undesirable condition or disease, as well as subjects at risk for development of the condition or disease.

[0427] By the term “therapeutically effective dose” or “effective amount” is meant a dose or amount that produces the desired effect for which it is administered. The exact dose or amount will depend on the purpose of the treatment, and will be ascertainable by one skilled in the art using known techniques (see, e.g., Lloyd (1999) The Art, Science and Technology of Pharmaceutical Compounding).

[0428] The term “sufficient amount” means an amount sufficient to produce a desired effect.

[0429] The term “therapeutically effective amount” is an amount that is effective to ameliorate a symptom of a disease. A therapeutically effective amount can be a “prophylactically effective amount” as prophylaxis can be considered therapy.

[0430] The term “ameliorating” refers to any therapeutically beneficial result in the treatment of a disease state, e.g., a neurodegenerative disease state, including prophylaxis, lessening in the severity or progression, remission, or cure thereof.

[0431] The actual amount administered, and rate and time-course of administration, will depend on the nature and severity of protein aggregation disease being treated. Prescription of treatment, e.g. decisions on dosage etc., is within the responsibility of general practitioners and other medical doctors, and typically takes account of the disorder to be treated, the condition of the individual patient, the site of delivery, the method of administration and other factors known to practitioners. Examples of the techniques and protocols mentioned above can be found in Remington's Pharmaceutical Sciences, 16th edition, Osol, A. (ed), 1980.

[0432] In some embodiments, the pharmaceutical composition is administered by inhalation, orally, by buccal administration, by sublingual administration, by injection or by topical application.

[0433] In some embodiments, the pharmaceutical composition is administered in an amount sufficient to modulate survival of neurons or dopamine release. In some embodiments, the major cannabinoid is administered in an amount less than 1 g, less than 500 mg, less than 100 mg, less than 10 mg per dose.

[0434] In some embodiments, the pharmaceutical composition is administered once a day, 2-4 times a day, 2-4 times a week, once a week, or once every two weeks.

[0435] A composition can be administered alone or in combination with other treatments, either simultaneously or sequentially dependent upon the condition to be treated. For example, the pharmaceutical composition can be administered in combination with one or more drugs targeting a different check-point receptor, such as PD-1 inhibitor (e.g., anti-PD-1 antibody), PD-L1 inhibitor, LAG-3 inhibitor, CD47 inhibitor, or TIGIT inhibitor (e.g., anti-TIGIT antibody).

[0436] In some embodiments, the disease is selected from the group consisting of cancer, AIDS, Alzheimer's disease and viral or bacterial infection. In certain embodiments, the disease is cancer.

[0437] In certain embodiments, the disease is cancer. In certain embodiments, the subject has a tumor. Cancers that may be treated include tumors that are not vascularized, or not yet substantially vascularized, as well as vascularized tumors. Types of cancers to be treated with the pharmaceutical composition described herein include, but are not limited to, carcinoma, blastoma, and sarcoma, and certain leukemia or lymphoid malignancies, benign and malignant tumors, and malignancies e.g., sarcomas, carcinomas, and melanomas. Adult tumors/cancers and pediatric tumors/cancers are also included. In some embodiments, the cancer is RCC (renal cell cancer), NSCLC (non-small cell lung cancer), Merkel cell carcinoma, cSCC, mesothelioma, MSI colorectal cancer, ovarian cancer, or cervical cancer. In some embodiments, the subject has a tumor with high levels of Tregs, high levels of CTLA-4, high levels of NK cells, or high levels of activating FcRs.

[0438] Solid tumors are abnormal masses of tissue that usually do not contain cysts or liquid areas. Solid tumors can be benign or malignant. Different types of solid tumors are named for the type of cells that form them (such as sarcomas, carcinomas, and lymphomas). Examples of solid tumors, such as sarcomas and carcinomas, include fibrosarcoma, myxosarcoma, liposarcoma, chondrosarcoma, osteosarcoma, and other sarcomas, synovioma, mesothelioma, Ewing's tumor, leiomyosarcoma, rhabdomyosarcoma, colon carcinoma, lymphoid malignancy, pancreatic cancer, breast cancer, lung cancers, ovarian cancer, prostate cancer, hepatocellular carcinoma, squamous cell carcinoma, basal cell carcinoma, adenocarcinoma, sweat gland carcinoma, medullary thyroid carcinoma, papillary thyroid carcinoma, pheochromocytomas sebaceous gland carcinoma, papillary carcinoma, papillary adenocarcinomas, medullary carcinoma, bronchogenic carcinoma, renal cell carcinoma, hepatoma, bile duct carcinoma, choriocarcinoma, Wilms' tumor, cervical cancer, testicular tumor, seminoma, bladder carcinoma, melanoma, and CNS tumors (such as a glioma (such as brainstem glioma and mixed gliomas), glioblastoma (also known as glioblastoma multiforme) astrocytoma, CNS lymphoma, germinoma, medulloblastoma, Schwannoma craniopharyogioma, ependymoma, pinealoma, hemangioblastoma, acoustic neuroma, oligodendroglioma, menangioma, neuroblastoma, retinoblastoma and brain metastases). In some embodiments, the subject has a tumor with high levels of Tregs, high levels of CTLA-4, high levels of NK cells, or high levels of activating FcRs.

[0439] In some embodiments, the subject is suffering from a cancer selected from the group consisting of colon carcinoma, breast cancer, pancreatic cancer, ovarian cancer, prostate cancer, fibrosarcoma, myxosarcoma, liposarcoma, chondrosarcoma, osteogenic sarcoma, chordoma, angiosarcoma, endotheliosarcoma, lymphangiosarcoma, lymphangioendotheliosarcoma, synovioma, mesothelioma, Ewing's tumor, leiomyosarcoma, rhabdomyosarcoma, squamous cell carcinoma, basal cell carcinoma, adenocarcinoma, sweat gland carcinoma, sebaceous gland carcinoma, papillary carcinoma, papillary adenocarcinomas, cystadenocarcinoma, medullary carcinoma, bronchogenic carcinoma, renal cell carcinoma, hepatoma, bile duct carcinoma, choriocarcinoma, seminoma, embryonal carcinoma, Wilms' tumor, cervical cancer, testicular tumor, lung carcinoma, small cell lung carcinoma, bladder carcinoma, epithelial carcinoma, glioma, astrocytoma, medulloblastoma, merkel cell carcinoma, craniopharyngioma, ependymoma, pinealoma, hemangioblastoma, acoustic neuroma, oligodendroglioma, meningioma, melanoma, neuroblastoma, retinoblastoma, acute lymphocytic leukemia, acute myelocytic leukemia, chronic leukemia, polycythemia vera, lymphoma, multiple myeloma, Waldenstrom's macroglobulinemia, heavy chain disease, and combinations thereof.

[0440] In some embodiments, the subject has a tumor with high levels of Tregs, high levels of CTLA-4, high levels of NK cells, or high levels of activating FcRs.

[0441] In additional embodiments, the cancer is a solid tumor selected from the group consisting of fibrosarcoma, myxosarcoma, liposarcoma, chondrosarcoma, osteosarcoma, and other sarcomas, synovioma, mesothelioma, Ewing's tumor, leiomyosarcoma, rhabdomyosarcoma, colon carcinoma, lymphoid malignancy, pancreatic cancer, breast cancer, lung cancers, ovarian cancer, prostate cancer, hepatocellular carcinoma, squamous cell carcinoma, basal cell carcinoma, adenocarcinoma, sweat gland carcinoma, medullary thyroid carcinoma, papillary thyroid carcinoma, pheochromocytomas sebaceous gland carcinoma, papillary carcinoma, papillary adenocarcinomas, medullary carcinoma, bronchogenic carcinoma, renal cell carcinoma, hepatoma, bile duct carcinoma, choriocarcinoma, Wilms' tumor, cervical cancer, testicular tumor, seminoma, bladder carcinoma, melanoma, and CNS tumors (such as a glioma (such as brainstem glioma and mixed gliomas), glioblastoma (also known as glioblastoma multiforme) astrocytoma, CNS lymphoma, germinoma, medulloblastoma, Schwannoma craniopharyogioma, ependymoma, pinealoma, hemangioblastoma, acoustic neuroma, oligodendroglioma, menangioma, neuroblastoma, retinoblastoma and brain metastases.

[0442] In certain embodiments, the cancer is a solid tumor selected from the group consisting of fibrosarcoma, myxosarcoma, liposarcoma, chondrosarcoma, osteosarcoma, and other sarcomas, synovioma, mesothelioma, Ewing's tumor, leiomyosarcoma, rhabdomyosarcoma, colon carcinoma/colorectal cancer, lymphoid malignancy, pancreatic cancer, breast cancer, lung cancers, ovarian cancer, prostate cancer, hepatocellular carcinoma, squamous cell carcinoma, basal cell carcinoma, adenocarcinoma, sweat gland carcinoma, medullary thyroid carcinoma, papillary thyroid carcinoma, pheochromocytomas sebaceous gland carcinoma, papillary carcinoma, papillary adenocarcinomas, medullary carcinoma, bronchogenic carcinoma, renal cell carcinoma, hepatoma, bile duct carcinoma, choriocarcinoma, Wilms' tumor, cervical cancer, testicular tumor, seminoma, bladder carcinoma, melanoma, and CNS tumors (such as a glioma (such as brainstem glioma and mixed gliomas), glioblastoma (also known as glioblastoma multiforme) astrocytoma, CNS lymphoma, germinoma, medulloblastoma, Schwannoma craniopharyogioma, ependymoma, pinealoma, hemangioblastoma, acoustic neuroma, oligodendroglioma, menangioma, neuroblastoma, retinoblastoma and brain metastases.

[0443] In another aspect, the present disclosure provides a method of reducing CTLA-4^{HI} Tregs in a subject with limited proliferation of remaining Tregs comprising administering to the subject an effective dose of an antigen binding protein.

[0444] In some embodiments, the subject is a human subject, optionally, a human subject with cancer.

[0445] In some embodiments, the subject is a human subject, optionally, a human subject with melanoma, RCC (renal cell cancer), NSCLC (non-small cell lung cancer), Merkel cell carcinoma, cSCC, mesothelioma, MSI colorectal cancer, ovarian cancer, or cervical cancer.

[0446] In some embodiments, the method further comprising the step of administering one or more additional therapeutic agents to the subject.

[0447] In some embodiments, the subject has a tumor with high levels of Tregs, high levels of CTLA-4, high levels of NK cells, or high levels of activating FcRs.

[0448] In some embodiments, the ABP binds to an antigen selected from CTLA-4, PD-L1, PD1 TIGIT, LAG-3 a CD47, BRAF, MEK, PI3K, and other antigens. In some embodiments, the ABP is specific to CTLA-4 or other antigens.

[0449] In some embodiments, the ABP is selected from an anti-CTLA-4 antibody or antigen-binding fragment thereof, anti-PD-L1 antibody or antigen-binding fragment thereof, an anti-PD1 antibody or antigen-binding fragment thereof, a TIGIT antibody or antigen-binding fragment thereof, a LAG-3 antibody or antigen-binding fragment thereof, a CD47 antibody or antigen-binding fragment thereof, a BRAF antibody or antigen-binding fragment thereof, a MEK antibody or antigen-binding fragment thereof, and a PI3K antibody or antigen-binding fragment thereof.

### 8. EXAMPLES

[0450] Below are examples of specific embodiments for carrying out the present disclosure. The examples are offered for illustrative purposes only, and are not intended to limit the scope of the present disclosure in any way. Efforts have been made to ensure accuracy with respect to numbers used (e.g., amounts, temperatures, etc.), but some experimental error and deviation should, of course, be allowed for.

[0451] The practice of the present disclosure will employ, unless otherwise indicated, conventional methods of protein chemistry, biochemistry, recombinant DNA techniques and pharmacology, within the skill of the art. Such techniques are explained fully in the literature. See, e.g., T. E. Creighton, Proteins: Structures and Molecular Properties (W.H. Freeman and Company, 1993); A. L. Lehninger, Biochemistry (Worth Publishers, Inc., current addition); Sambrook, et al., Molecular Cloning: A Laboratory Manual (2nd Edition, 1989); Methods In Enzymology (S. Colowick and N. Kaplan eds., Academic Press, Inc.); Remington's Pharmaceutical Sciences, 18th Edition (Easton, Pa.: Mack Publishing Company, 1990); Carey and Sundberg Advanced Organic Chemistry 3^{rd} Ed. (Plenum Press) Vols A and B (1992). Furthermore, methods of generating and selecting antibodies explained in Adler et al., A natively paired antibody library yields drug leads with higher sensitivity and specificity than a randomly paired antibody library, MAbs (2018), and Adler et al., Rare, high-affinity mouse anti-CTLA-4 antibodies that function in checkpoint blockade, discovered using microfluidics and molecular genomics, MAbs (2017), which are incorporated by reference in its entirety herein, can be employed.

### 8.1. Example 1: Generation of Antigen Binding Protein

### Mouse Immunization and Sample Preparation:

[0452] First, transgenic mice carrying inserted human immunoglobulin genes were immunized with soluble CTLA-4 immunogen of SEQ ID NO: 7001 (i.e., His-tagged CTLA-4 protein (R&D Systems)) using TiterMax as an adjuvant. One μg of immunogen was injected into each hock and 3 pg of immunogen was administered intraperitoneally, every third day for 15 days. Titer was assessed by enzyme-linked immunosorbent assay (ELISA) on a 1:2 dilution series of each animal's serum, starting at a 1:200 dilution. A final intravenous boost of 2.5 μg/hock without adjuvant was given to each animal before harvest. Lymph nodes (popliteal, inguinal, axillary, and mesenteric) were surgically removed after sacrifice. Single cell suspensions for each animal were made by manual disruption followed by passage through a 70 μm filter. Next, the EasySep™ Mouse Pan-B Cell Isolation Kit (Stemcell Technologies) negative selection kit was used to isolate B cells from each sample. The lymph node B cell populations were quantified by counting on a C-Chip hemocytometer (Incyto) and assessed for viability using Trypan blue. The cells were then diluted to 5,000-6,000 cells/mL in phosphate-buffered saline (PBS) with 12% OptiPrep™ Density Gradient Medium (Sigma). This cell mixture was used for microfluidic encapsulation. Approximately one million B cells were run from each of the six animals through an emulsion droplet microfluidics platform.

### Generating Paired Heavy and Light Chain Libraries:

[0453] A DNA library encoding scFv from RNA of single cells, with native heavy-light Ig pairing intact, was generated using the emulsion droplet microfluidics platform or vortex emulsions. The method for generating the DNA library was divided into 1) poly(A)+mRNA capture, 2) multiplexed overlap extension reverse transcriptase polymerase chain reaction (OE-RT-PCR), and 3) nested PCR to remove artifacts and add adapters for deep sequencing or yeast display libraries. The scFv libraries were generated from approximately one million B cells from each animal that achieved a positive ELISA titer.

[0454] For poly(A)+mRNA capture, a custom designed co-flow emulsion droplet microfluidic chip fabricated from glass (Dolomite) was used. The microfluidic chip has two input channels for fluorocarbon oil (Dolomite), one input channel for the cell suspension mix described above, and one input channel for oligo-dT beads (NEB) at 1.25 mg/ml in cell lysis buffer (20 mM Tris pH 7.5, 0.5 M NaCl, 1 mM ethylenediaminetetraacetic acid (EDTA), 0.5% Tween-20, and 20 mM dithiothreitol). The input channels were etched to 50 μm by 150 μm for most of the chip's length, narrow to 55 μm at the droplet junction, and were coated with hydrophobic Pico-Glide (Dolomite). Three Mitos P-Pump pressure pumps (Dolomite) were used to pump the liquids through the chip. Droplet size depends on pressure, but typically droplets of ˜45 mm diameter are optimally stable. Emulsions were collected into chilled 2 ml microcentrifuge tubes and incubated at 40° C. for 15 minutes for mRNA capture. The beads were extracted from the droplets using Pico-Break (Dolomite). In some embodiments, similar single cell partitioning emulsions were made using a vortex.

[0455] For multiplex OE-RT-PCR, glass Telos droplet emulsion microfluidic chips were used (Dolomite). mRNA-bound beads were re-suspended into OE-RT-PCR mix and injected into the microfluidic chips with a mineral oil-based surfactant mix (available commercially from GigaGen) at pressures that generate 27 μm droplets. The OE-RT-PCR mix contains 2× one-step RT-PCR buffer, 2.0 mM MgSO₄, SuperScript III reverse transcriptase, and Platinum Taq (Thermo Fisher Scientific), plus a mixture of primers directed against the IgK C region, the IgG C region, and all V regions (FIG. 2). The overlap region was a DNA sequence that encodes a Gly-Ser rich scFv linker sequence. The DNA fragments were recovered from the droplets using a droplet breaking solution (available commercially from GigaGen) and then purified using QIAquick PCR Purification Kit (Qiagen). In some embodiments, similar OE-RT-PCR emulsions were made using a vortex.

[0456] For nested PCR (FIG. 2), the purified OE-RT-PCR product was first run on a 1.7% agarose gel for 80 minutes at 150 V. A band at 1200-1500 base pair (bp) corresponding to the linked product was excised and purified using NucleoSpin Gel and PCR Clean-up Kit (Macherey Nagel). PCR was then performed to add adapters for Illumina sequencing or yeast display; for sequencing, a randomer of seven nucleotides is added to increase base calling accuracy in subsequent next generation sequencing steps. Nested PCR was performed with 2× NEBNext High-Fidelity amplification mix (NEB) with either Illumina adapter containing primers or primers for cloning into the yeast expression vector. The nested PCR product was run on a 1.2% agarose gel for 50 minutes at 150V. A band at 800-1100 bp was excised and purified using NucleoSpin Gel and PCR Clean-up Kit (Macherey Nagel).

[0457] In some embodiments, scFv libraries were not natively paired, for example, randomly paired by amplifying scFv directly from RNA isolated from B cells.

### 8.2. Example 2: Isolation of CTLA-4 Binders by Yeast Display

### Library Screening:

[0458] Human IgG1-Fc (Thermo Fisher Scientific) and CTLA-4 (R&D Systems) proteins were biotinylated using the EZ-Link Micro Sulfo-NHS-LC-Biotinylation kit (Thermo Fisher Scientific). The biotinylation reagent was resuspended to 9 mM and added to the protein at a 50-fold molar excess. The reaction was incubated on ice for 2 hours and then the biotinylation reagent was removed using Zeba desalting columns (Thermo Fisher Scientific). The final protein concentration was calculated with a Bradford assay.

[0459] Next, the six DNA libraries were expressed as surface scFv in yeast. A yeast surface display vector (pYD) that contains a GAL1/10 promoter, an Aga2 cell wall tether, and a C-terminal c-Myc tag was built. The GAL1/10 promoter induces expression of the scFv protein in medium that contains galactose. The Aga2 cell wall tether was required to shuttle the scFv to the yeast cell surface and tether the scFv to the extracellular space. The c-Myc tag was used during the flow sort to stain for yeast cells that express in-frame scFv protein. Saccharomyces cerevisiae cells (ATCC) were electroporated (Bio-Rad Gene Pulser II; 0.54 kV, 25 uF, resistance set to infinity) with gel-purified nested PCR product and linearized pYD vector for homologous recombination in vivo. Transformed cells were expanded and induced with galactose to generate yeast scFv display libraries.

[0460] Two million yeast cells from the expanded scFv libraries were stained with anti-c-Myc (Thermo Fisher Scientific A21281) and an AF488-conjugated secondary antibody (Thermo Fisher Scientific A11039). To select scFv-expressing cells that bind to CTLA-4, biotinylated CTLA-4 antigen was added to the yeast culture (7 nM final) during primary antibody incubation and then stained with PE-streptavidin (Thermo Fisher Scientific). Yeast cells were flow sorted on a BD Influx (Stanford Shared FACS Facility) for double-positive cells (AF488C/PEC), and recovered clones were then plated on SD-CAA plates with kanamycin, streptomycin, and penicillin (Teknova) for expansion. The expanded first round FACS clones were then subjected to a second round of FACS with the same antigen at the same molarity (7 nM final). Plasmid minipreps (Zymo Research) were prepared from yeast recovered from the final FACS sort. Tailed-end PCR was used to add Illumina adapters to the plasmid libraries for deep sequencing.

[0461] In a typical FACS dot plot, the upper right quadrant contains yeast that stain for both antigen binding and scFv expression (identified by a C-terminal c-Myc tag). The lower left quadrant contains yeast that do not stain for either the antigen or scFv expression. The lower right quadrant contains yeast that express the scFv but do not bind the antigen. The frequency of binders in each repertoire was estimated by dividing the count of yeast that double stain for antigen and scFv expression by the count of yeast that express an scFv. Libraries generated from immunized mice yielded low percentages of scFv binders (ranging from 0.08%-1.28%) when sorted at 7 nM final antigen concentration. There was no clear association between serum titer and the frequency of binders in a repertoire. Following expansion of these sorted cells, a second round of FACS at 7 nM final antigen concentration was used to increase the specificity of the screen. The frequency of binders in the second FACS was always substantially higher than the first FACS, ranging from 8.39%-84.4%. Generally, lower frequency of binders in the first sort yielded lower frequency of binders in the second sort. Presumably, this is due to lower gating specificity for samples that have fewer bona fide binders in the original repertoire.

### Deep Repertoire Sequencing:

[0462] CTLA-4-binding clones were recovered as a library (“a library of CTLA-4 binding clones”), and subjected to deep repertoire sequencing. Deep repertoire sequencing determines the sequences of all paired variable (V(D)J) regions of both heavy and light chain sequences. The library of CTLA-4 binding clones was deposited under ATCC Accession No. PTA-125512 under the Budapest Treaty on Nov. 20, 2018, under ATCC Account No. 197361 (American Type Culture Collection (ATCC), 10801 University Boulevard, Manassas, Va. 20110 USA). Each clone in the library contains an scFv comprising a paired variable (V(D)J) regions of both heavy and light chain sequences originating from a single cell. Deep repertoire sequencing determines the sequences of all paired variable (V(D)J) regions of both heavy and light chain sequences. Some of the heavy and light chain sequences obtained from sequencing the yeast scFv library are provided in SEQ ID NOS: 1-28 and SEQ ID NOS: 101-128. Additional sequences obtained from sequencing the yeast scFv library are provided in SEQ ID NOS 8000-8991. Specifically, their variable light chain (V_{L}) sequences include SEQ ID NOS: 8000-8495. Their heavy chain (V_{H}) sequences include SEQ ID NOS: 8496-8991.

[0463] Deep antibody sequencing libraries were quantified using a quantitative PCR Illumina Library Quantification Kit (KAPA) and diluted to 17.5 pM. Libraries were sequenced on a MiSeq (Illumina) using a 500 cycle MiSeq Reagent Kit v2, according to the manufacturer's instructions. To obtain high quality sequence reads with maintained heavy and light chain linkage, sequencing was performed in two separate runs. In the first run (“linked run”), the scFv libraries were directly sequenced to obtain forward read of 340 cycles for the light chain V-gene and CDR3, and reverse read of 162 cycles that cover the heavy chain CDR3 and part of the heavy chain V-gene. In the second run (“unlinked run”), the scFv library was first used as a template for PCR to separately amplify heavy and light chain V-genes. Then, forward reads of 340 cycles and reverse reads of 162 cycles for the heavy and light chain Ig were obtained separately. This produces forward and reverse reads that overlap at the CDR3 and part of the V-gene, which increases confidence in nucleotide calls.

[0464] To remove base call errors, the expected number of errors (E) for a read were calculated from its Phred scores. By default, reads with E>1 were discarded, leaving reads for which the most probable number of base call errors is zero. As an additional quality filter, singleton nucleotide reads were discarded because sequences found two or more times have a high probability of being correct. Finally, high-quality, linked antibody sequences by merging filtered sequences were generated from the linked and unlinked runs. Briefly, a series of scripts that first merged forward and reverse reads from the unlinked run were written in Python. Any pairs of forward and reverse sequences that contained mismatches were discarded. Next, the nucleotide sequences from the linked run were used to query merged sequences in the unlinked run. The final output from the scripts is a series of full-length, high-quality variable (V(D)J) sequences, with native heavy and light chain Ig pairing.

[0465] To identify reading frame and FR/CDR junctions, a database of well-curated immunoglobulin sequences were first processed to generate position-specific sequence matrices (PSSMs) for each FR/CDR junction. These PSSMs were used to identify FR/CDR junctions for each of the merged nucleotide sequences generated using the processes described above. This identified the protein reading frame for each of the nucleotide sequences. CDR sequences that have a low identify score to the PSSMs are indicated by an exclamation point. Python scripts were then used to translate the sequences. Reads were required to have a valid predicted CDR3 sequence, so, for example, reads with a frame-shift between the V and J segments were discarded. Next, UBLAST was run using the scFv nucleotide sequences as queries and V and J gene sequences from the IMGT database as the reference sequences. The UBLAST alignment with the lowest E-value was used to assign V and J gene families and compute % ID to germline.

[0466] Each animal yielded 38-50 unique scFv sequences present at 0.1% frequency or greater after the second FACS selection, including a total of 28 unique scFv candidate binders (SEQ ID Nos: 1-28 for light chains; SEQ ID Nos: 101-128 for heavy chains). The light chain having a sequence of SEQ ID NO: [n] and the heavy chain having a sequence of SEQ ID NO: [100+n] are a cognate pair from a single cell, and forming a single scFv. For example, the light chain of SEQ ID NO:1 and the heavy chain of SEQ ID NO:101 are a cognate pair, the light chain of SEQ ID NO:28 and the heavy chain of SEQ ID NO:128 are a cognate pair, etc.

[0467] In this method, the two rounds of FACS resulted in enrichment of the CTLA-4-binding scFvs. In addition, many scFv were not detected in the sequencing data from the initial population of B cells from the immunized mice and most of the scFv present in the pre-sort mouse repertoires were eliminated following FACS. Therefore, this work suggests that most of the antibodies present in the repertoires of immunized mice are not strong binders to the immunogen and that this method can enrich for rare nM-affinity binders from the initial population of B cells from immunized mice.

### 8.3. Example 3: Biological Characteristics of Antigen Binding Protein

[0468] scFv sequences that were present at low frequency in pre-sort libraries and became high frequency in post-sort libraries were then synthesized as full-length mAbs in Chinese hamster ovary (CHO) cells. These mAbs comprise the 2-3 most abundant sequences in the second round of FACS for each animal.

### CTLA-4 Target Binding Profiles

[0469] The binding specificity and affinity of each full-length antibody towards CTLA-4 were determined using biolayer interferometry (BLI) and/or surface plasmon resonance (SPR). Anti-cyno CTLA-4 and anti-mouse CTLA-4 affinities were tested using ForteBio (BLI). Anti-human CTLA-4 affinities were measured using Carterra (SPR).

[0470] For BLI, antibodies were loaded onto an Anti-Human IgG Fc (AHC) biosensor using the Octet Red96 system (ForteBio). Loaded biosensors were dipped into antigen dilutions beginning at 300 nM, with 6 serial dilutions at 1:3. Kinetic analysis was performed using a 1:1 binding model and global fitting.

[0471] For SPR, a moderate density (»1,000 Response Units) of an antihuman IgG-Fc reagent (Southern Biotech 2047-01) was amine-coupled to a Xantec CMD-50M chip (50 nm carboxymethyldextran medium density of functional groups) activated with 133 mM EDC (Sigma) and 33.3 mM S-NHS (ThermoFisher) in 100 mM MES pH 5.5. Then, goat anti-Human IgG Fc (Southern Biotech 2047-01) was coupled for 10 minutes at 25 mg/m L in 10 mM Sodim Acetate pH 4.5 (Carterra Inc.). The surface was then deactivated with 1 M ethanolamine pH 8.5 (Carterra Inc.). Running buffer used for the lawn immobilization was HBS-EPC (10 mM HEPES, 150 mM NaCl, 3 mM EDTA, 0.05% Tween 20, pH 7.4; Teknova).

[0472] The sensor chip was then transferred to a continuous flow microspotter (CFM; Carterra Inc.) for array capturing. The mAb supernatants were diluted 50-fold (3-10 mg/mL final concentration) into HBS-EPC with 1 mg/mL BSA. The samples were each captured twice with 15-minute and 4-minute capture steps on the first and second prints, respectively, to create multiple densities, using a 65 mL/min flow rate. The running buffer in the CFM was also HBS-EPC.

[0473] Next, the sensor chip was loaded onto an SPR reader (MX-96 system; Ibis Technologies) for the kinetic analysis. CTLA-4 was injected at five increasing concentrations in a four-fold dilution series with concentrations of 1.95, 7.8, 31.25, 125, and 500 nM in running buffer (HBS-EPC with 1.0 mg/mL BSA). CTLA-4 injections were 5 minutes with a 15-minute dissociation at 8 mL/second in a non-regenerative kinetic series. An injection of the goat anti-Human IgG Fc capture antibody at 75 mg/mL was injected at the end of the series to verify the capture level of each mAb. Binding data was double referenced by subtracting an interspot surface and a blank injection and analyzed for ka (on-rate), kd (off-rate), and KD (affinity) using the Kinetic Interaction Tool software (Carterra Inc.).

[0474] For cell surface binding studies, stable CTLA-4 expressing Flp-In CHO (Thermo Fisher Scientific) cells were generated and mixed at a 50:50 ratio. One million cells were stained with 1 μg of the disclosed anti-CTLA-4 recombinant antibodies in 200 μl of MACS Buffer (DPBS with 0.5% bovine serum albumin and 2 mM EDTA) for 30 minutes at 4° C. Cells were then co-stained with anti-human irrelevant target APC and anti-human IgG Fc-PE [M1310G05](BioLegend 41070) antibodies for 30 minutes at 4° C. An anti-human CTLA-4-FITC antibody was used as a control for these mixing experiments and cell viability was assessed with DAPI. Flow cytometry analysis was conducted on a BD Influx at the Stanford Shared FACS Facility and data was analyzed using FlowJo.

[0475] Antibodies that specifically bind to CTLA-4 were identified. Affinity to CTLA-4 (K_{D}) of each antibody is provided in TABLE 6. The Promega assay % inhibition was calculated relative to the strongest inhibitor, which is antibody A5. The affinity of each antibody against human CTLA-4, the on rate, off rate, and KD are shown in TABLE 7.

TABLE 6

| | | Promega | | Affinity | Affinity | Affinity |
|---|---|---|---|---|---|---|
| | | assay | | to | to | to |
| | Binds | antagonist | Promega | Human | Cyno | Mouse |
| | by | (EC50, | assay % | CTLA- | CTLA4 | CTLA-4 |
| Ab# | FACS? | ug/mL) | inhibition | 4(nM) | (nM) | (nM) |
| Ipilimumab | Yes | 0.51 | 50.2% | 4.9 | 1.3 | no binding |
| A1 | Yes | 0.13 | 43.2% | 0.77 | 0.96 | 51 |
| A2 | Yes | 0.12 | 75.4% | 5.1 | 3.1 | no binding |
| A3 | Yes | 0.18 | 49.8% | 1.5 | 1.2 | no binding |
| A4 | Yes | 0.15 | 81% | 3 | 1.2 | no binding |
| A5 | Yes | 0.18 | 100% | 4.6 | 2.2 | 39.4 |
| A6 | Yes | 0.18 | 61.7% | 5.7 | 1.6 | 87.8 |
| A7 | Yes | 0.17 | 11.5% | 5.7 | 0.75 | no binding |
| A8 | Yes | 0.15 | 54.7% | 4.6 | 1 | no binding |
| A9 | Yes | 0.19 | 60.8% | 6.8 | 0.92 | no binding |
| A10 | Yes | 0.26 | 24.5% | 22 | 3.1 | no binding |
| A11 | Yes | 0.42 | 26.6% | 7.5 | 1.6 | no binding |
| A12 | Yes | no blocking | 0% | 5.3 | 4.5 | not tested |
| A13 | Yes | 0.09 | 13.3% | 3.2 | 9.6 | not tested |
| A14 | Yes | 0.09 | 6% | 9.8 | 23.6 | not tested |
| A15 | Yes | no blocking | 0% | 10 | 2.6 | not tested |
| A16 | Yes | no blocking | 0% | 23 | 2.8 | not tested |
| A17 | Yes | no blocking | 0% | 51 | 6.3 | not tested |
| A18 | Yes | 0.89 | 8.6% | 48 | no binding | not tested |
| A19 | No | not tested | not tested | 3.3 | not tested | not tested |
| A20 | No | not tested | not tested | 20 | not tested | not tested |
| A21 | No | not tested | not tested | 31 | not tested | not tested |
| A22 | No | not tested | not tested | 32 | not tested | not tested |
| A23 | No | no blocking | 0% | 35 | not tested | not tested |
| A24 | No | not tested | not tested | 55 | not tested | not tested |
| A25 | No | not tested | not tested | 58 | not tested | not tested |
| A26 | No | not tested | not tested | 74 | not tested | not tested |
| A27 | No | not tested | not tested | 120 | not tested | not tested |
| A28 | No | no blocking | 0% | 46 | not tested | not tested |

TABLE 7

| | kon (M−1 s−1) | koff (s−1) | KD (M) |
|---|---|---|---|
| Ipilimumab | 6.50E+04 | 3.20E−04 | 4.90E−09 |
| A1 | 2.10E+05 | 1.60E−04 | 7.70E−10 |
| A2 | 1.00E+05 | 5.20E−04 | 5.10E−09 |
| A3 | 1.90E+05 | 2.80E−04 | 1.50E−09 |
| A4 | 7.60E+04 | 2.30E−04 | 3.00E−09 |
| A5 | 9.00E+04 | 4.20E−04 | 4.60E−09 |
| A6 | 6.10E+04 | 3.50E−04 | 5.70E−09 |
| A7 | 6.40E+04 | 3.60E−04 | 5.70E−09 |
| A8 | 8.50E+04 | 3.90E−04 | 4.60E−09 |
| A9 | 6.30E+04 | 4.30E−04 | 6.80E−09 |
| A10 | 2.30E+04 | 5.10E−04 | 2.20E−08 |
| A11 | 4.70E+04 | 3.50E−04 | 7.50E−09 |
| A12 | 5.10E+04 | 2.70E−04 | 5.30E−09 |
| A13 | 1.30E+05 | 4.20E−04 | 3.20E−09 |
| A14 | 5.40E+04 | 5.20E−04 | 9.80E−09 |
| A15 | 7.00E+04 | 7.30E−04 | 1.00E−08 |
| A16 | 3.10E+04 | 7.20E−04 | 2.30E−08 |
| A17 | 6.60E+04 | 3.40E−03 | 5.10E−08 |
| A18 | 4.20E+03 | 2.00E−04 | 4.80E−08 |
| A19 | 1.20E+05 | 3.80E−04 | 3.30E−09 |
| A20 | 3.20E+04 | 6.40E−04 | 2.00E−08 |
| A21 | 1.80E+04 | 5.50E−04 | 3.10E−08 |
| A22 | 1.10E+04 | 3.60E−04 | 3.20E−08 |
| A23 | 3.40E+04 | 1.20E−03 | 3.50E−08 |
| A24 | 2.50E+04 | 1.40E−03 | 5.50E−08 |
| A25 | 3.00E+04 | 1.80E−03 | 5.80E−08 |
| A26 | 3.50E+03 | 2.60E−04 | 7.40E−08 |
| A27 | 3.10E+04 | 3.60E−03 | 1.20E−07 |
| A28 | 5.20E+04 | 2.40E−03 | 4.60E−08 |

### CTLA-4 Ligand Blocking Assay:

[0476] For analysis of the antibodies' ability to block the CTLA-4/ligand interaction, the CTLA-4 Blockade Bioassay (Promega) was used according to the manufacturer's instructions. On the day prior to the assay, aAPC/Raji cells that express CTLA-4 ligands CD80 and CD86 were thawed into 90% Ham's F-12/10% fetal bovine serum (FBS) and plated into the inner 60 wells of two 96-well plates. The cells were incubated overnight at 37° C., 5% CO₂. On the day of assay, antibodies were diluted in 99% RPMI/1% FBS. The antibody dilutions were added to the wells containing the CTLA-4 ligand expressing aAPC/Raji cells, followed by addition of CTLA-4 effector cells (thawed into 99% RPMI/1% FBS). The cell/antibody mixtures were incubated at 37° C., 5% CO₂ for 6 hours, after which Bio-Glo Reagent was added and luminescence was read using a Spectramax i3x plate reader (Molecular Devices). Fold-induction was plotted by calculating the ratio of [signal with antibody]/[signal with no antibody], and the plots were used to calculate the EC50 using SoftMax Pro (Molecular Devices). In-house produced ipilimumab was used as a positive control, and an antibody binding to an irrelevant antigen was used as a negative control.

[0477] Binding of CTLA-4 to its ligand leads to inhibition of T cell signaling. Antibodies that bind CTLA-4 and antagonize CTLA-4/ligand interactions can therefore remove this inhibition, allowing T cells to be activated. CTLA-4/ligand checkpoint blockade was tested through an in vitro cellular Nuclear Factor of Activated T cells (NFAT) luciferase reporter assay. In this assay, antibodies whose anti-CTLA-4 epitopes fall inside the ligand binding domain antagonize CTLA-4/ligand interactions, resulting in an increase of the NFAT-luciferase reporter. The full-length mAb candidates that can bind CTLA-4 expressed in CHO cells were assayed. To generate an EC50 value for each mAb, measurements were made across several concentrations. It was found that some full-length mAbs are functional in checkpoint blockade in a dose dependent manner as summarized in TABLE 6.

[0478] The ability of the CTLA4 antibodies (indicated in TABLE 8) to prevent the binding of CD80 or CD86 to plate-bound CTLA4 was evaluated using ELISA. The EC50 and the percent inhibition of each interaction is shown in the TABLE 8. Plates were coated with rhCTLA4-Fc and then blocked with 1×PBST with 5% w/v nonfat dry milk. After blocking a dilution series of the indicated antibody was added to the plate. Then, to determine how much CD80 or CD86 was still able to bind plate bound CTLA4, after the plates were washed, rhCD80-His or rhCD86-His, respectively, was added to the plate. Unbound CD80-His/CD86-His was washed away and mouse anti-His-HRP was added. TMB was used to determine how much CD80-His/CD86-His bound to the plate bound CTLA4 in the presence of each antibody.

[0479] In some embodiments of the present disclosure, the anti-CTLA-4 antibodies function pharmacologically by antibody-dependent cell-mediated cytotoxicity (ADCC). In some embodiments of the present disclosure, immune-related toxicities related to anti-CTLA-4 antibody therapy are abrogated with an antibody that functions in ADCC but which does not function in checkpoint blockade.

TABLE 8

| | CD80 EC50 | CD80 % | CD86 EC50 | CD86 % |
|---|---|---|---|---|
| Antibody | (ug/mL) | inhibition | (ug/ml) | inhibition |
| Ipilimumab | 0.08211 | 96.5% | 0.1136 | 90.6% |
| CTLA4.A7 | 0.9955 | 92.1% | 1.98 | 78.8% |
| CTLA4.A2 | 0.1006 | 95.4% | 0.1452 | 91.5% |
| CTLA4.A12 | 0.2427 | 89.2% | 0.3704 | 77.4% |
| CTLA4.A14 | 0.2262 | 83.7% | 0.2442 | 54.5% |
| CTLA4.A5 | 0.07049 | 96.3% | 0.1218 | 90.6% |

### Epitope Binning:

[0480] Epitope binning was performed using high-throughput Array SPR in a modified classical sandwich approach. A sensor chip was functionalized using the Carterra CFM and methods similar to the SPR affinity studies, except a CMD-200M chip type was used (200 nm carboxymethyl dextran, Xantec) and mAbs were coupled at 50 mg/mL to create a surface with higher binding capacity (˜3,000 reactive units immobilized). The mAb supernatants were diluted at 1:1 or 1:10 in running buffer, depending on the concentration of the mAb in the supernatant.

[0481] The sensor chip was placed in the MX-96 instrument, and the captured mAbs (“ligands”) were crosslinked to the surface using the bivalent amine reactive linker bis(sulfosuccinimidyl) suberate (BS3, ThermoFisher), which was injected for 10 minutes at 0.87 mM in water. Excess activated BS3 was neutralized with 1 M ethanolamine pH 8.5. For each binning cycle, a 7-minute injection of 250 mg/mL human IgG (Jackson ImmunoResearch 009-000-003) was used to block reference surfaces and any remaining capacity of the target spots.

[0482] Next, 250 nM CTLA-4 protein was injected onto the sensor chip, followed by injections of the diluted mAb supernatants (“analytes”) or buffer blanks as negative controls. Thus, the analyte mAb only bound to the antigen if it was not competitive with the ligand mAb. At the end of each cycle, a one minute regeneration injection was performed using a solution of 4 parts Pierce IgG Elution Buffer (ThermoFisher #21004), one part 5 M NaCl (0.83 M final), and 1.25 parts 0.85% H3PO4 (0.17% final).

[0483] A network community plot algorithm was then used in an SPR epitope data analysis software package (Carterra Inc.) to determine epitope bins. Note that the clustering algorithm groups mAbs for which only analyte data are available separately from the mAbs for which both ligand and analyte data are available. This phenomenon is an artifact of the incomplete competitive matrix. mAbs with both ligand and analyte data had more mAb-mAb measurements, resulting in more mAb-mAb connections, which led to a closer relationship in the community plot.

[0484] The epitope binning showed that all the mAbs were in distinct bins from ipilimumab (FIG. 3).

### 8.4. Example 4: Influence of CTLA-4 ABPs on Tumor Growth

[0485] Transgenic mice expressing human CTLA-4 (hCTLA-4 KI mice) were implanted subcutaneously with MC38 tumor cells on the right flank. The hCTLA-4 KI mice were treated with one mg/kg of the indicated CTLA-4 antibody on Days 8, 11, and 14 post-implantation. Specifically, the mice were treated with a control antibody (n=8), ipilumumab (n=8), CTLA4. A2 antibody (n=8), CTLA4. A14 antibody (n=9), CTLA4. A14.2a antibody (n=8), CTLA4. A7 antibody (n=9), CTLA4. A7 antibody (n=9), and CTLA4. A12 antibody (n=8). CTLA-4. A14.2a antibody is the A14 antibody cloned onto a mouse IgG2a background, which enhances antibody-dependent cellular cytotoxicity (ADCC) activity. Tumor volume was measured and tumor growth inhibition was calculated using the formula below:

Mean % Inhibition=(mean(C)−mean(T))/mean(C)*100%
[0486] T—current group value
[0487] C—control group value

[0488] Tumors were implanted subcutaneously in the right flank region with MC38 tumor cells (1×10⁶) in 0.1 ml of PBS for tumor development. The cells in exponential growth phase were harvested and quantitated by cell counter before tumor implantation. Tumor volumes were measured twice per week in two dimensions using a caliper, and the volume will be expressed in mm³ using the formula: “V=(L×W×W)/2, where V is tumor volume, L is tumor length (the longest tumor dimension) and W is tumor width (the longest tumor dimension perpendicular to L). Dosing as well as tumor and body weight measurements were conducted in a Laminar Flow Cabinet. The body weights and tumor volumes were measured by using StudyDirector™ software (version 3.1.399.19). Animals were dosed i.p. (intraperitoneally) with the indicated protein in a sterile saline solution including 0.1 mg/ml of the indicated protein. Each mouse received 10 microliters of the indicated solution per a gram of body weight, which leads to a dosing of 1 mg/kg. Animals were dosed days 0, 3, and 6 post randomization.

[0489] TABLE 9 shows the percentage of mice in which the tumor had a complete response (CR) to the treatment. At least 2 consecutive tumor measurements of 0 mm³ following treatment initiation qualifies as a CR.

TABLE 9

| Antibody | % of tumors with CR | |
|---|---|---|
| Control | 12.5% | (1 of 8) |
| Ipilimumab | 75% | (6 of 8) |
| CTLA4.A2 | 100% | (8 of 8) |
| CTLA4.A14 | 66.67% | (6 of 9) |
| CTLA4.A14.2a | 75% | (6 of 8) |
| CTLA4.A7 | 55.6% | (5 of 9) |
| CTLA4.A12 | 50% | (4 of 8) |

[0490] TABLE 10 shows the percentage of mice with tumors that had a CR but then later relapsed by day 56. The group treated with CTLA4. A14.2a that had previously shown a CR had 0% relapse by day 56, indicating that enhancing ADCC can prolong the anti-tumor immunity.

TABLE 10

| | % of relapse by Day 56 in tumors | |
|---|---|---|
| Antibody | that had previously shown CR | |
| Ipilimumab | 16.67% | (1 of 6) |
| CTLA4.A2 | 25% | (2 of 8) |
| CTLA4.A14 | 33.3% | (2 of 6) |
| CTLA4.A14.2a | 0% | (0 of 6) |

[0491] TABLE 11 shows the mean inhibition of tumor volume over time when the hCTLA-4 KI mice implanted with MC38 tumor cells were treated with one mg/kg of the control or one mg/kg of the indicated CTLA-4 antibodies.

TABLE 11
Mean Inhibition

| Study day | 8 | 11 | 14 | 17 | 21 | 24 | 27 | 29 | 31 | 35 | 38 |
|---|---|---|---|---|---|---|---|---|---|---|---|
| Control | n/a | n/a | n/a | n/a | n/a | n/a | n/a | n/a | n/a | n/a | n/a |
| Ipilimumab | −3.81% | 0.44% | 31.41% | 69.65% | 84.04% | 90.73% | 96.00% | 96.92% | 96.61% | 87.45% | 88.27% |
| CTLA4.A7 | −7.49% | 10.91% | 34 54% | 60.11% | 70.73% | 81.04% | 78.25% | 78.75% | 70.60% | 50.50% | 43.41% |
| CTLA4.A2 | −6.79% | −6.10% | 26.70% | 61.14% | 85.22% | 97.98% | 99.58% | 100.00% | 100.00% | 99.55% | 99.36% |
| CTLA4.A12 | −5.89% | 12.35% | 34.21% | 49.59% | 70.56% | 86.82% | 90.22% | 91.82% | 91.13% | 68.63% | 70.44% |
| CTLA4.A14 | −7.37% | −6.91% | 26.70% | 58.54% | 80.64% | 93.71% | 95.73% | 97.23% | 97.26% | 92.22% | 90.17% |
| CTLA4.A14.2a | −4.74% | −20.04% | 9.74% | 40.80% | 65.98% | 87.85% | 93.48% | 95.01% | 93.66% | 81.40% | 82.75% |

This data is also shown in FIG. 17A.

### 8.5. Example 5: Influence of CTLA4 ABPs on Systemic Anti-Tumor Immunity

[0492] The hCTLA4 KI mice bearing MC38 tumors were treated with the indicated anti-CTLA4 on days 8, 11, and 14 post tumor cell implantation, as explained supra. The mice in which tumors displayed a CR were re-challenged with implantation of MC38 cells on the opposite flank. TABLE 12 shows the individual mouse tumor volumes (mm³) of the original or re-challenge tumors on the final day of the study (73 days after the original tumor cell implantation and 30 days after the re-challenge implantation). There was no growth of re-challenge tumors in mice in which the original tumor remained a CR. The 3 instances of growth seen in the re-challenge tumors were in mice in which the original tumor had started to re-grow (see TABLE 12). The results also indicated that CTLA4. A2 may induce protective systemic anti-tumor immunity even when the primary tumor (original tumor) relapses (see TABLE 13).

TABLE 12

| | | Ipilimumab | | CTLA4.A2 | | CTLA4.A1 |
|---|---|---|---|---|---|---|
| | Ipilimumab | (re- | CTLA4.A2 | (re- | CTLA4.A1 | 4 (re- |
| | (original | challenge | (original | challenge | 4 (original | challenge |
| | tumor) | tumor) | tumor) | tumor) | tumor) | tumor) |
| Tumor | 0 | 0 | 0 | 0 | 105.7 | 85.3 |
| Volume | 1822.3 | 149.6 | 0 | 0 | 0 | 0 |
| (mm³) | 0 | 0 | 0 | 0 | 913.3 | 98.1 |
| | 0 | 0 | 0 | 0 | 0 | 0 |
| | 0 | 0 | 1415 | 0 | 0 | 0 |
| | 0 | 0 | 0 | 0 | 0 | 0 |
| | | | 678.9 | 0 | | |
| | | | 0 | 0 | | |

TABLE 13

| | % of secondary tumors that |
|---|---|
| Antibody | grew if primary tumor relapsed |
| Ipilimumab | 100% (1 of 1) |
| CTLA4.A2 | 0% (0 of 2) |
| CTLA4.A14 | 100% (2 of 2) |

Data from this experiment is also shown in FIG. 17B.

### 8.6. Example 6: Influence of Increased Dosage of CLTA-4 ABPs

[0493] MC38 Tumors Treated with Anti-CTLA-4

[0494] Transgenic mice expressing human CTLA-4 (hCTLA-4 KI mice) were implanted with MC38 tumor cells on the right flank. Randomization started when the mean tumor size reached 98.5 mm². The hCTLA-4 KI mice were treated with 5 mg/kg of the indicated anti-CTLA4 bi-weekly for 5 doses starting on day 0 post-randomization. The administered antibodies are shown in TABLE 14. CTLA4. A14.2a is antibody A14 cloned onto a mouse IgG2a backbone, which enhances ADCC activity. The 297 suffix denotes that the hIgG1 Fc was mutated at the N297 amino acid to eliminate glycosylation and thus Fc effector function including ADCC.

### A) Tumor Growth Inhibition

[0495] Over the course of the study, tumor growth inhibition was determined using the formula below:

Mean % Inhibition=(mean(C)−mean(T))/mean(C)*100%
[0496] T—current group value
[0497] C—control group value

[0498] The results showed that antibodies lacking Fc activity had reduced efficacy overall. These antibodies were still able to induce tumor regression in some animals, indicating that anti-CTLA4 works by both Fc-dependent and Fc-independent mechanisms of action, and indicating that anti-CTLA4s lacking Fc activity, including ADCC and ADCP, can induce anti-tumor responses (TABLEs 14 and 15).

TABLE 14

| | Mean Inhibition | | | | | | |
|---|---|---|---|---|---|---|---|
| Study Day | 0 | 3 | 6 | 10 | 13 | 17 | 20 |
| 1x PBS (negative control) | n/a | n/a | n/a | n/a | n/a | n/a | n/a |
| Ipilimumab | 0.31% | −21.76% | 12.56% | 75.43% | 91.55% | 95.54% | 98.71% |
| CTLA4.A5 | 0.74% | −28.09% | −6.22% | 64.17% | 87.32% | 98.32% | 100.00% |
| CTLA4.A14 | −0.56% | −13.30% | 5.33% | 68.17% | 86.21% | 92.79% | 97.52% |
| CTLA4.A12 | 0.40% | −32.59% | −14.13% | 57.48% | 83.00% | 94.99% | 98.04% |
| CTLA4.A8 | 0.26% | −18.48% | −14.18% | 52.53% | 78.37% | 96.15% | 97.96% |
| CTLA4.A7 | −0.61% | −7.67% | 10.04% | 76.74% | 94.36% | 98.88% | 100.00% |
| CTLA4.A2 | 0.27% | −23.97% | −9.95% | 60.95% | 89.33% | 98.35% | 100.00% |
| CTLA4.A13 | −1.15% | −7.61% | 6.23% | 49.18% | 64.82% | 93.82% | 95.23% |
| CTLA4.A5.2a | 0.88% | 11.78% | 27.51% | 66.64% | 89.02% | 96.85% | 100.00% |
| CTLA4.A14.2a | 1.04% | −7.89% | 21.12% | 45.60% | 84.83% | 97.30% | 100.00% |
| Ipilimumab.297 | 0.68% | 8.27% | 21.37% | 22.75% | 16.02% | 25.70% | 26.39% |
| CTLA4.A5.297 | −0.33% | 17.56% | 18.58% | 5.70% | −15.40% | 4.65% | 13.61% |

TABLE 15
% of each group in which tumor had started to
regress by day 13 post treatment initiation

| | |
|---|---|
| 1× PBS (negative control) | 0% |
| Ipilimumab | 100% |
| CTLA4.A5 | 100% |
| CTLA4.A14 | 100% |
| CTLA4.A12 | 88% |
| CTLA4.A8 | 100% |
| CTLA4.A7 | 100% |
| CTLA4.A2 | 100% |
| CTLA4.A13 | 86% |
| CTLA4.A5.2a | 100% |
| CTLA4.A14.2a | 100% |
| Ipilimumab.297 | 25% |
| CTLA4.A5.297 | 14% |

Data from this experiment is also shown in_FIGS. 12B, 14A and 27.

### B) Histopathological Analysis:

[0499] The hCTLA-4 mice were euthanized and their right kidneys were harvested for histopathological analysis. Tissue was formalin-fixed and paraffin-embedded, and cut in 5 μm sections that were placed on glass slides for standard hematoxylin and eosin (H&E) staining as well as anti-IgG and anti-C3 immunohistochemistry (IHC) staining. Stained slides were prepared as digital images. A board-certified veterinary pathologist with experience in laboratory animals and toxicologic pathology evaluated the H&E images for any findings and evaluated the anti-IgG and C3 slides for location, intensity, and percent of positive staining. Findings in H&E images were scored on a scale from 0 to 5 (0=within normal limits, 1=minimal findings or the least change discernible, 2=mild findings, 3=moderate, 4=marked, and 5=severe or to the greatest extent possible). Findings in IHC images were scored on a scale of 1 to 4 for intensity (0=negative, 1=minimal or slightly positive and 4=very dark), and as a percent of the positive cells in the glomeruli (after reviewing at least 5 glomeruli).

[0500] The H&E, immunoglobulin, or C3 stain images were scored by a blinded pathologist and the results are shown in FIG. 4A-4C. The main H&E finding was that leukocytes in the renal interstitium are not usually involved in glomeruli. Ig and C3 deposition in the glomeruli scoring are also shown in FIG. 4A-4C.

### C) Alkaline Phosphatase:

[0501] The hCTLA-4 mice were also analyzed for changes in alkaline phosphatase level. The level of alkaline phosphatase in the serum was determined using comprehensive diagnostic rotors on ABAXIS VetScan VS2.

[0502] The study found that ipilimumab (IPI) elevates alkaline phosphatase levels, which may be an indication of immune-mediated hepatitis. The CTLA4 antibodies (e.g., CTLA4. A14.2A) showed a decrease in elevation of alkaline phosphatase levels (FIG. 5). This decreased elevation in alkaline phosphatase induced by the presently disclosed CTLA4 antibodies may indicate they are less likely to induce immune-mediated hepatitis than treatments such as ipilimumab.

### 8.7. Example 7: Influence of CTLA-4 ABPs on a Second Tumor Model

[0503] RM1 Tumors Treated with Anti-CTLA-4

[0504] Transgenic mice expressing human CTLA-4 (hCTLA-4 KI mice) were implanted with RM1 tumor cells on the right flank. (Human IgG1 isotype negative control n=7, atezolimumab n=8, n=11 for all other groups). The hCTLA4 KI mice were treated with the antibodies indicated in TABLE 16. The CTLA4 antibodies were dosed at 5 mg/kg on days 0, 3, and 6 post randomization and atezolizumab was dosed at 5 mg/kg biweekly for 3 weeks starting at day 0 post randomization. Human IgG1 isotype negative control was dosed at 5 mg/kg on Days 0, 3, and 6 post randomization. The mean inhibition of tumor growth was determined at Days 0, 4, 7, 11, 14, and 18 using the following formula:

Mean % Inhibition=(mean(C)−mean(T))/mean(C)*100%
[0505] T—current group value
[0506] C—control group value

[0507] TABLE 16 shows that mean inhibition values for the control, the CTLA4 antibodies, and the atezolizumab treatments over the course of the study.

TABLE 16

| | Mean Inhibition | | | | | |
|---|---|---|---|---|---|---|
| Study day | 0 | 4 | 7 | 11 | 14 | 18 |
| Human IgG1 isotype | n/a | n/a | n/a | n/a | n/a | n/a |
| (negative control) | | | | | | |
| Ipilimumab | 2.14% | 11.33% | 30.07% | 41.96% | 52.16% | 57.56% |
| CTLA4.A2 | 0.09% | −12.28% | 25.30% | 43.83% | 50.20% | 59.41% |
| CTLA4.A14 | −0.17% | −7.72% | 22.10% | 36.93% | 48.84% | 55.18% |
| Atezolizumab | 1.83% | 17.66% | 0.41% | −3.02% | −7.89% | −2.89% |
| Atezolizumab + | −0.47% | −3.31% | 18.00% | 29.81% | 30.39% | 35.21% |
| Ipilimumab | | | | | | |
| Atezolizumab + | 1.50% | −6.72% | 23.00% | 41.64% | 40.93% | 44.30% |
| CTLA4.A2 | | | | | | |
| Atezolizumab + | 0.87% | 2.55% | 31.58% | 45.65% | 47.43% | 55.18% |
| CTLA4.A14 | | | | | | |

Data from this experiment is also shown in FIG. 14B.

### 8.8. Example 8: Combination Treatment (Pembrolizumab and Anti-CTLA4s)

[0508] Transgenic mice expressing human CTLA-4 and PD-1 (hCTLA4-hPD1 knock in (KI) mice, n=8 per treatment group) were implanted subcutaneously with 1×10⁶ MC38 tumor cells in the right flank. The hCTLA4-hPD1 KI mice were treated with a control (1× phosphate buffered saline, or PBS); 2 mg/kg pembrolizumab (pembro) or 2 mg/kg pembro+5 mg/kg anti-CTLA4, administered i.p. with a dose volume of 10 ml/kg per animal as indicated in TABLE 17 twice weekly for three weeks starting on day 1 post-randomization. The mean (%) delta inhibition of tumor growth induced by each treatment in comparison to control treatment was calculated using the formula below and the results are shown in TABLE 17.

Mean % ΔInhibition=((mean(C)−mean(C₀))−(mean(T)−mean(T₀)))/(mean(C)−Mean(C₀))*100%
[0509] T—current group value
[0510] T₀—current group initial value
[0511] C—control group value
[0512] C₀—control group initial value

TABLE 17

| | Mean Delta Inhibition | | | | | | |
|---|---|---|---|---|---|---|---|
| Study day | 4 | 7 | 10 | 14 | 17 | 21 | 24 |
| Control | n/a | n/a | n/a | n/a | n/a | n/a | n/a |
| Pembrolizumab | 44.33% | 44.20% | 30.78% | 20.92% | 10.08% | 8.62% | −11.94% |
| Pembrolizumab + | 29.57% | 79.32% | 85.83% | 87.28% | 86.27% | 78.55% | 97.36% |
| CTLA4.A5 | | | | | | | |
| Pembrolizumab + | −82.05% | −5.30% | 41.81% | 50.97% | 55.73% | 52.23% | 66.74% |
| CTLA4.A1 | | | | | | | |

[0513] The study showed that mice treated with pembro alone did not exhibit tumor growth inhibition at day 24, however the addition of the indicated CTLA4 antibodies increased the tumor growth inhibition over the course of the study.

[0514] At the end of the experiment, select tumors were harvested and flow cytometry was conducted to investigate intratumoral immune cell populations. The data indicate that anti-CTLA4s decrease intratumoral Treg populations while increasing intratumoral NK cell populations (FIG. 6).

### 8.9. Example 9: Immune Related Adverse Events

[0515] Transgenic mice expressing human CTLA-4 (hCTLA-4 KI mice) were implanted with MC38 tumor cells on the right flank. The hCTLA-4 KI mice were treated with one mg/kg of the indicated CTLA-4 antibody on days 8, 11, and 14 post-implantation. The mice were weighed on days 8, 11, 14, and 17 post-implantation. Animal counts were: n=8 for ipilimumab, n=9 for A7, n=8 for A2, n=9 for A14, and n=8 for A14.2. The percent changes in body weight of the mice receiving the indicated anti-CTLA4 treatments are shown in FIG. 7.

[0516] The mice treated with CTLA4. A7, CTLA4. A14, and CTLA4. A14.2a did not appear to exhibit weight loss after the final dose of anti-CTLA4 (FIG. 7). This finding was unexpected because immune-related Adverse Events (irAE) have been reported to be greater when anti-CTLA4s with enhanced ADCC (e.g., CTLA.A14.2a) are administered. This data suggest that anti-CTLA4s with reduced blocking activity may limit induction of irAEs even when ADCC is enhanced.

### 8.10. Example 10: Peripheral Flow Cytometry

[0517] Transgenic mice expressing human CTLA-4 (hCTLA-4 KI mice) were implanted with MC38 tumor cells in the right flank. The hCTLA-4 KI mice were treated with one mg/kg of the indicated CTLA-4 antibody on days 8, 11, and 14 post-implantation. Peripheral flow cytometry was performed on day 27. 100 μL of blood was used for staining. The findings from the peripheral blood flow cytometry are shown in FIGS. 8A-8F, 9A-9D and 10.

[0518] The results provided in FIG. 8A indicated that CTLA4. A2 and CTLA4. A14 decrease the elevation of peripheral T cells (CD3+). Enhancing ADCC with CTLA4. A14.2a increased newly activated T cells (CD69+). CTLA4. A2 and CTLA4. A14 resulted in fewer non-conventional regulatory cells (CD4+PD1+, CD4+ICOS+). (See FIGS. 8D and 8E).

[0519] The results also indicated that CTLA4. A2 and CTLA4. A14 better enhance CD8+ T cells (FIG. 9A). CTLA4. A2 better enhanced newly activated T cells (CD8+CD69+) and led to decreased T cell exhaustion (CD8+PD1+) relative to Ipilimumab. ICOS has been described as a pharmacodynamic marker for anti-CTLA4. Enhancing ADCC with CTLA4. A14.2a appeared to further elevate CD8+ICOS+ cells (FIG. 9A-9D). The results also indicated that CTLA4. A2 and CTLA4. A14.2a lead to decreased peripheral immune activation relative to Ipilimumab, as judged by the frequency of dendritic cells (DCs) and activated DCs (CD86+). (see FIG. 10).

### 8.11. Example 11: Treatment with Low Dose CTLA-4 Study

[0520] Transgenic mice expressing human CTLA-4 (hCTLA-4 KI mice) were implanted subcutaneously in the right flank region with MC38 tumor cells (1E6) in 0.1 ml of PBS for tumor development. The cells in exponential growth phase were harvested and quantitated by cell counter before tumor implantation. The hCTLA-4 KI mice were randomized when the mean tumor volume was 96.15 mm³ and treated with 0.3 mg/kg of the indicated anti-CTLA4, ipilimumab, or human IgG1 isotype control (Isotype) on days 0, 3 and 6 post-randomization. Tumor volume and mean % of inhibition was determined as described in Example 4. CTLA4. A2 and CTLA4. A14 resulted in significantly higher tumor inhibition over the 18 days of the study. The results of the study are shown in TABLE 18 and FIG. 11.

TABLE 18

| | Dates/Study Days | | | | | |
|---|---|---|---|---|---|---|
| | Dec. 6, 2019 | Dec. 10, 2019 | Dec. 13, 2019 | Dec. 17, 2019 | Dec. 20, 2019 | Dec. 24, 2019 |
| | Group | | | | | |
| Isotype | 0 | 4 | 7 | 11 | 14 | 18 |
| Ipilimumab | −0.17% | 9.33% | 18.68% | 22.37% | 27.23% | 11.84% |
| CTLA4.A2 | 0.22% | 13.00% | 23.03% | 49.09% | 60.03% | 59.54% |
| CTLA4.A14 | 0.01% | 23.39% | 35.06% | 53.05% | 57.50% | 45.41% |

Data from this experiment is also shown in FIGs. 11, 14C and 30.

### 8.12

### 8.13. Example 12: Epitope Mapping of CTLA-4

[0521] Epitope mapping of commercially available anti CTLA-4 monoclonal antibody ipilimumab and anti CTLA-4 monoclonal antibody GIGA-564 (also described as clone A14 and CTLA4. A14 herein) was performed. The CDR sequences are described below in Table 21:

TABLE 21
CDR sequences of Ipilimumab and GIGA-564

| | Ipilimumab | | GIGA-564 | |
|---|---|---|---|---|
| | Heavy | Light | Heavy | Light |
| CDR1 | GFTFSSY (SEQ | QSVGSSYLA | GFTFSSY (SEQ | QSVSSSYLA |
| | ID NO: 12069) | (SEQ ID NO: | ID NO: 12075) | (SEQ ID NO: |
| | | 12072) | | 12078) |
| CDR2 | SYDGNN (SEQ | GAFSRAT (SEQ | WYEGRN (SEQ | GASSRAT (SEQ |
| | ID NO: 12070) | ID NO: 12073) | ID NO: 12076) | ID NO: 12079) |
| CDR3 | TGWLGPFDY | QQYGSSPWT | AGDLGAFDI | QQYGSSPWT |
| | (SEQ ID NO: | (SEQ ID NO: | (SEQ ID NO: | (SEQ ID NO: |
| | 12071) | 12074) | 12077) | 12080) |

[0522] Briefly, comprehensive alanine scanning mutagenesis was performed across the CTLA-4 protein. The mutant proteins were expressed in human cells, and binding by the two antibodies was determined, Protein expression and folding of the mutant proteins was validated and binding to wild-type CTLA-4 was used to normalize the data. Stringency was increased using, e.g., pH or salt modifications, to determine only the most important residues. The results are presented in Table 22.

TABLE 22
Critical residues for binding of
Ipilimumab and GIGA-564 to CTLA-4

| | Ipilimumab | GIGA-564 |
|---|---|---|
| CTLA-4 residues | R70, K130, Y139, | K130, Y139, L141, |
| | L041, I143 | I143 |

This data is also described in FIGS. 13C-D.

[0523] The results show that the antibodies share a common epitope. However, R70 on CTLA-4 is a critical residue for Ipilimumab but not for GIGA-564 binding. It is known that R70 is also involved in CD80 and CD86 binding to CTLA-4 (see, e.g., Li, Dong et al. “A functional antibody cross-reactive to both human and murine cytotoxic T-lymphocyte-associated protein 4 via binding to an N-glycosylation epitope.” mAbs vol. 12, 1 (2020): 1725365 and Udupi A. et al. “Structural basis for cancer immunotherapy by the first-in-class checkpoint inhibitor ipilimumab.” PNAS May 2017, 114 (21) E4223-E4232). It is also known that R70 is contacted by the heavy chain CDR2 in the crystal structure of Ipilimumab bound to CTLA-4; the heavy chain CDR2 sequences of the two antibodies are dissimilar.

[0524] In addition, the data show that L74A is a secondary residue for both, and impacts GIGA 564 binding more than Ipilimumab.

[0525] It is known that the shared epitope residues are contacted by the heavy chain CDR3 and light chain CDR3 in the crystal structure. The light chain CDR3 sequences of the two antibodies are identical.

[0526] The experiments were also performed with a Fab version of each antibody. The data show that E68 is also an important residue for GIGA-564 binding.

[0527] In conclusion, Ipilimumab and GIGA-564 have overlapping but distinct epitopes. R70 in critical for the binding of Ipilimumab but not GIGA-564. It is likely that R70 is available to associate with CD80/CD86 when GIGA-564 is bound. E68 and L74 are possible differentiators between monoclonal antibody Ipilimumab and monoclonal antibody GIGA-564.

### 8.14. Example 13: Mechanism of Action of GIGA-564 Compared to Ipilimumab in a Murine Model

[0528] The inventors of the present disclosure developed a novel CTLA-4 monoclonal antibody with minimal ability to block CTLA-4 binding to its CD80/CD86 ligands that has superior anti-tumor activity, and reduced toxicity compared to ipilimumab in murine models expressing human CTLA-4.

[0529] The study described herein assesses and characterizes the mechanism of action of GIGA-564 CTLA-4 antibody compared to ipilimumab in a murine model. Additionally, the anti-tumor effect of conventional anti-CTLA-4 mAbs, including ipilimumab, was investigated in the presence and absence of Fc effector functions.

### Materials and Methods

[0530] Some of the methods described previously are repeated below.

### Antibody Sequences

[0531] Amino acid sequences for the IgK and IgG variable regions for the 14 antibodies described here that were expressed as full-length antibodies and tested for in vitro blocking activity are listed in Table 26.

TABLE 26
CTLA-4 antibody sequences

| Antibody | IgK variable sequence | IgG variable region sequence |
|---|---|---|
| aCTLA-4.1 | EIVLTQSPGTLSLSPGERATLSCRASQSVSYLAW | QVQLVESGGGVVQPGRSLRLSCAASGFTFSRYG |
| | YQQKPGQAPRLLIYGASSRATGIPDRFSGSGSGT | MHWVRQAPGKGLEWVAVIWYDGRNKYYADS |
| | DFTLTISRLEPEDFAVYYCQQYGSSPWTFGQGT | VKGRFTISRDNSKNTLYLQMNSLRAEDTALYSC |
| | KVEIK | ARAGELGPFDYWGQGTLVTVSSA |
| aCTLA-4.2 | EIVLTQSPGTLSLSPGERATLSCRASQSVSSSYLA | QVQLVESGGGVVQPGRSLRLSCIASGFTFSSYG |
| | WYQQKPGQAPRLLIYGASSRATGIPDRFSGSGS | MHWVRQAPGKGLEWVAVNWYDGSNKHYADS |
| | GTDFTLTISRLEPEDFAVYYCQQYGSSPFTFGPG | VKGRFTISRDNSKNTLYLQMNSLRAEDTAVYY |
| | TKVDIK | CARGGVWGPYFDYWGQGTLVTVSSA |
| aCTLA-4.3 | EIVLTQSPGTLSLSPGERATLSCRASQSVSSSYLA | QVQLVESGGGVVQPGRSLRLSCAASGFTLSSFG |
| | WYQQKPGQAPRLLIYGASSRATGIPDRFSGSGS | MHWVRQAPGKGLEWVAVIWYDGSNKYYADS |
| | GTDFTLTISRLEPEDFAVYYCQQYGSSPFTFGPG | VKGRFIISRDNSKTALYLQMNSLRAEDTAVYYC |
| | TKVDIK | ARAHYFGAFDIWGQGTMVTVSSA |
| aCTLA-4.4 | EIVLTQSPGTLSLSPGERATLSCRASQSVSSSYLA | QVQLVESGGGVVQPGRSLRLSCAASGFTFSNYG |
| | WYQQKPGQAPRLLIYGASSRATGIPDRFSGSGS | MNWVRQAPGKGLEWVAVIWYDGRNKHYADS |
| | GTDFTLTISRLEPEDFAVYYCQQYGRSPFTFGPG | VKGRFTISRDNSKNTLYLQMNSLRAEDTAVYY |
| | TKVDIK | CARGGDWGPYFDYWGQGTLVTVSSA |
| aCTLA-4.9 | EIVLTQSPGTLSLSPGEGATLSCRASQSFSSNYLA | QVQLVESGGGVVQPGRSLRLSCAASGFTFSSFG |
| | WYQQKPGQAPRLLIYGASSRATGIPDRFSGSGS | MHWVRQAPGKGLEWVAVIWYDGRNKYYVDS |
| | GTDFTLTISRLEPEDFAVYYCQQYGTSPFTFGPG | VKGRFTISRDNSNNTLYLQMNSLRAEDTAVYY |
| | TKVDIK | CARGEFFGEFFDYWGQGTLVTVSSA |
| aCTLA-4.11 | EIVLTQSPGTLSLSPGERATLSCRASQSVSYLAW | QVQLVESGGGVVQPGRSLRLSCAASGFTFSSYG |
| | YQQKPGQAPRLLIYGASSRATGIPDRFSGSGSGT | MHWVRQAPGKGLEWVAVIWYDGSNKFYADSV |
| | DFTLTISRLEPEDFAVYYCQQYGSSPWTFGQGT | KGRFTISSDNSKNTLYLQMNSLRAEDTAVYYCA |
| | KVEIK | RGGHLGSFDYWGQGTLVTVSSA |
| aCTLA-4.12 | EIVLTQSPGTLSLSPGERATLSCRASQSVSSSYLA | QVQLVESGGGVVQPGRSLRLSCAASGFTFSSYG |
| | WYQQKPGQAPRLLIYGASSRATGIPDRFSGSGS | MHWVRQAPGKGLEWVAVIWYDGSNKYYADS |
| | GTDFTLTISRLEPEDFAVYYCQQYGTSPWTFGQ | VKGRFTFSRDNSKNTLYLQMNSLRAEDTAVYY |
| | GTKVEIK | CARGGLMGAFDYWGQGTLVTVSSA |
| aCTLA-4.14 | EIVLTQSPGTLSLSPGERATLSCRASQSVSSSYLA | QVQLVESGGGVVQPGRSLRLSCAASGFTFSSYG |
| | WYQQKPGQAPRLLIYGASSRATGIPDRFSGSGS | MHWVRQAPGKGLEWVAVIWYDGRNKDYADS |
| | GTDFTLTISRLEPEDFAVYYCQQYGSSPFTFGPG | VKGRITISRDNSKNTLYLQMNSLRAEDTAVYYC |
| | TKVDIK | ARGGLLGPYFDYWGQGTLVTVSSA |
| aCTLA-4.15 | EIVLTQSPGTLSLSPGERATLSCRASQSVSSSYLA | QVQLVESGGGVVQPGRSLRLSCAASGFTFSSYG |
| (GIGA-564) | WYQQKPGQAPRLLIYGASSRATGIPDRFSGSGS | MHWVRQAPGTGLEWVAVIWYEGRNKYYADP |
| | GTDFTLTISRLEPEDFAVYYCQQYGSSPWTSGQ | VKGRFTISRDNSKNTLYLQMNSLRDDDTAVYY |
| | GTKVEIK | CARAGDLGAFDIWGQGTMVTVSSA |
| aCTLA-4.22 | EIVLTQSPGTLSLSPGERATLSCRASQSVSSSYLA | QVQLVESGGGVVQPGRSLRLSCVASGFTLSSYG |
| | WYQQKPGQAPRLLIYGASSRATGIPDRFSGSGS | MHWVRQAPGKGLEWVAVIWYDGSNKHYADS |
| | GTDFTLTISRLEPEDFAVYYCQQYGSSPFTFGPG | VKGRFTISRDNSKNTLSLQMNSLRAEDTAVYYC |
| | TKVDIK | ARGGQLGPFDYWGQGTLVTVSSA |
| aCTLA-4.24 | DIQMTQSPSSLSASVGDRVTITCRASQSISSYLN | QVQLVESGGGVVQPGRSLRLSCAASGFTFSSHG |
| | WYQQKPGKAPKLLIYAASSLQSGVPSRFSGSGS | MHWVRQAPGKGLEWVAVIWYDGSNKHYADS |
| | GTDFTLTISSLQPEDFATYYCQQSYSTPFTFGPGT | VKGRFTISRDNSKNTLYLQMNSLRAEDTAVYY |
| | KVDIK | CARGDILTGYYGYWGQGTLVTVSSA |
| aCTLA-4.26 | DIQMTQSPSSLSASVGDRVTITCRASQSISSYLN | QVQLVESGGGVVQPGRSLRLSCAASGFTFSSYG |
| | WYQQKPGKAPKLLIYAASSLQSGVPSRFSGSGS | MHWVRQAPGKGLEWVAVIWYDGSYKYYADS |
| | GTDFTLTISSLQPEDFATYYCQQSYSTPFTFGPGT | VKGRFTISRDDSKNTLYLQMSSLRAEDTAVYYC |
| | KVDIK | ARAPHYAILTGYYEDYWGQGTLVTVSSA |
| aCTLA-4.28 | EIVLTQSPGTLSLSPGDRATLSCRASQSGSSSYLA | QVQLVESGGGVVQPGRSLRLSCAASGFTFSSYG |
| | WYQQKPGQAPRLLIYGASSRATGIPDRFSGSGS | MHWVRQAPGKGLEWVAVIWYDGNNKYYADS |
| | GTDFTLTISRLEPEDFAVYYCQQYGTSPFTSGPG | VKGRFTISRDNSKNTLYLQMYSLRAEDTAVYY |
| | TKVDIK | CARGGILAAGIFDYWGQGTLVTVSSA |
| aCTLA-4.29 | EIVLTQSPGTLSLSPGDRATLSCRASQSGSSSYLA | QVQLVESGGGVVQPGRSLRISCAASGFTFSSYGI |
| | WYQQKPGQAPRLLIYGASSRATGIPDRFSGSGS | HWVRQAPGKGLQWVAVIWYDGRNKYYADSV |
| | GTDFTLTISRLEPEDFAVYYCQQYGTSPFTSGPG | KGRFTISRDNSKNTLYLQMNSLRAEDTAVYYCS |
| | TKVDIK | RSGSFGAFDIWGQGTMVTVSSA |

### Generation of Full-Length Antibodies and Expression in CHO Cells

[0532] Five Trianni Mouse® mice expressing antibodies with fully-human variable regions were immunized at Antibody Solutions (Sunnyvale, Calif., USA), as described elsewhere (41). Briefly, mice were immunized with soluble His-tagged CTLA-4 (CT4-H5229; Acro Biosystems, Newark, Del., USA) and alendronate (ALD)/muramyl dipeptide (MDP) adjuvant twice per week for four weeks. Mice were euthanized and inguinal and popliteal lymph nodes and spleen were harvested and processed into a single cell suspension. Cells from all mice were pooled by tissue type and B cells were selected from lymph node and spleen using a mouse Pan-B negative selection kit (Stemcell Technologies, Vancouver, BC, Canada). Generation of natively paired heavy and light chain libraries, yeast surface display of scFvs and FACS sorting, and antibody repertoire analysis was described elsewhere.

[0533] From this analysis, scFv sequences were selected for full-length antibody expression based on enrichment after sorting. Expression constructs were Gibson assembled using GeneBlocks (Integrated DNA Technologies, Coralvile, Iowa, USA) and NEBuilder HiFi DNA Assembly Master Mix (NEB, Ipswich, Mass., USA) to integrate sequences into a vector appropriate for transient expression in CHO cells. The vector used was a variant of the pCDNA5/FRT mammalian expression vector (Thermo Fisher Scientific, Waltham, Mass., USA). The vector has an elongation factor 1 alpha (EF1α) promoter to express light chain followed by a bovine growth hormone (BGH) polyA sequence and a cytomegalovirus (CMV) promoter to express heavy chain followed by a second BGH polyA sequence. All constructs were synthesized as human IgG1 isotype, regardless of a given antibody's IgG isotype in the original repertoire. Constructs were transformed into NEB 10-beta E. coli for amplification and purified with the ZymoPURE Plasmid Maxiprep Kit (Zymo Research, Irvine, Calif., USA). The purified plasmid was then used for transient transfection in the ExpiCHO system (Thermo Fisher Scientific, Waltham, Mass., USA). Transfected cells were cultured for 7-9 days in ExpiCHO medium, and then antibodies were purified from filtered supernatant using Protein A columns (MilliporeSigma, St. Louis, Mo., USA). Antibody purity and proper size was verified by Coomassie stained sodium dodecyl sulphate-polyacrylamide gel electrophoresis (SDS-PAGE) (Thermo Fisher Scientific, Waltham, Mass., USA).

### Transient Transfection and mAb Protein Production

[0534] For larger-scale expression, the full-length kappa chain of GIGA-564 (A14; “aCTLA-4.15”) was cloned into a separate pSF expression vector (MilliporeSigma, St. Louis, Mo., USA) with a CMV promoter. The immunoglobulin kappa-only and dual-gene (immunoglobulin kappa and immunoglobulin gamma) plasmids were transfected at a 2:1 molar ratio into ExpiCHO cells using ExpiFectamine (Thermo Fisher Scientific, Waltham, Mass., USA). Briefly, for every 100 mL of culture 100 μg of total plasmid was mixed with 320 μl of ExpiFectamine in 4 mL of OptiPro serum free media (Thermo Fisher Scientific, Waltham, Mass., USA), incubated at room temperature for 5 minutes, then added to cells freshly passaged to 6×10⁶ cells/mL. Cells were fed on day 1 and day 5 after transfection with 16 mL of ExpiCHO feed, then harvested on Day 8 or when the viability dropped below 75%.

[0535] Harvested cell-culture fluid (HCCF) was loaded onto a HiTrap MabSelect Prism A column (Cytiva, Marlborough, Mass., USA), equilibrated with PBS pH 7.0-7.4 using a fast protein liquid chromatography (FPLC) instrument (AKTA pure 25, Cytiva, Marlborough, Mass., USA), and eluted with 100 mM citrate pH 3. Fractions were pooled to collect >90% of eluted material and neutralized to pH 6.2 using 1 M tris pH 9. Neutralized eluate was dialyzed into 40 mM histidine+240 mM sucrose pH 6.2 and formulated with 0.2% tween-20. Concentration was determined by absorbance (NanoDrop 8000, Thermo Fisher Scientific, Waltham, Mass., USA) and endotoxin quantified by limulus amebocyte lysate assay (NexGen PTS, Charles River, Wilmington, Mass., USA). Routine biophysical characterization included size exclusion chromatography high performance liquid chromatography (SEC-HPLC; 7.8×300 mm, 2.7 μM, 300A column, Agilent, Santa Clara, Calif., USA), SDS-PAGE (12% tris-glycine, Thermo Fisher Scientific, Waltham, Mass., USA), and capillary electrophoresis sodium dodecyl sulphate (CE-SDS; protein 230, BioAnalyzer 2100, Agilent, Santa Clara, Calif., USA).

### Clonal Cluster Analysis and Visualization

[0536] USEARCH was used to compute the total amino acid differences between each pairwise alignment of FACS-sorted scFv sequences. The R package igraph (version 1.2.6) was then used to generate a clustering plot for the pairwise alignments. The sequences were represented as “nodes”, while “edges” were the links between nodes. Edges indicate pairwise alignments with ≤9 amino acid differences. The layout_with_graphopt (charge=0.03, niter=1000) option was used to format the output.

### Affinity Measurements

[0537] Kinetic analysis of CTLA-4 mAb HCCF from CHO expression was performed on an MX-96 instrument (IBIS Technologies, Enschede, Netherlands) by Carterra (Dublin, Calif., USA). A medium density capture chip was created with anti-Human IgG Fc (SouthernBiotech, Birmingham, Ala., USA) with a surface density of 925-1200 RU. A CFM printer (IBIS Technologies, Enschede, Netherlands) printed one 10 minute print of mAb HCCF for each sample. His-tagged human CTLA-4 antigen (CT4-H5229; Acro Biosystems, Newark, Del., USA) injections for kinetic analysis were 5 minutes and dissociations were 10 minutes. Kinetic analysis was performed with five 5-fold serial titrations starting at 500 nM antigen and fitted to a 1:1 monovalent model.

[0538] Binding/dissociation experiments to determine the affinity of mAb HCCF from CHO expression to His-tagged cynomolgus CTLA-4 (CT4-C5227; Acro Biosystems, Newark, Del., USA) were performed at 30° C. on an Octet Red96 instrument (ForteBio, Fremont, Calif.) by a CRO (Bionova Scientific, Fremont, Calif., USA). Antibodies were loaded at 5 μg/mL onto Protein A biosensors that were dipped into 80 nM antigen, and kinetic constants were calculated using a monovalent model.

Flow Cytometry for In Vitro Characterization of mAbs

[0539] To determine if the CTLA-4 mAbs bound the appropriate antigen expressed on the surface of mammalian cells, CHO cell lines stably expressing human CTLA-4 or an irrelevant antigen (CD27) were generated. Cells (0.5×10⁶ each cell line) were combined and washed with MACS buffer (Dulbecco's Phosphate Buffered Saline [DPBS], with 0.5% bovine serum albumin [BSA], and 2 mM ethylenediaminetetraacetic acid [EDTA]). The cells were incubated with 10 μg/mL anti-CTLA-4 for 30 min at 4° C., then excess, unbound mAbs were removed by washing twice with MACS buffer. The cells were then stained with PE-conjugated anti-Human IgG Fc antibody (clone M1310G05, BioLegend 410720, San Diego, Calif., USA) to detect bound anti-CTLA-4 and with fluorescein isothiocyanate (FITC)-conjugated anti-CD27 (clone 0323, BioLegend 302806, San Diego, Calif., USA) to distinguish the cells expressing the irrelevant antigen. Cells were washed twice with MACS buffer, fixed with 4% paraformaldehyde fixation buffer (BioLegend 420801, San Diego, Calif., USA) for 20 minutes at room temperature and washed twice more with MACS buffer. For validation of the N297Q variants of the ipilimumab analog and aCTLA-4.28, a similar procedure was followed except CHO cells lacking expression of human CTLA-4 were used in place of the CD27-expressing cells, the two cell lines were stained separately, FITC-conjugated anti-Human IgG Fc antibody (clone M1310G05, BioLegend 410719, San Diego, Calif., USA) was used to detect bound anti-CTLA-4, cells were not treated with fixation buffer, and cells were instead stained with 4′,6-diamidino-2-phenylindole (DAPI; BioLegend, San Diego, Calif., USA) and gated for live (DAPI⁻) cells on the cytometer. Binding of mAbs to CTLA-4 on the cell surface was determined using LSR II (BD Biosciences, San Jose, Calif., USA) or CytoFLEX LX (Beckman Coulter, Brea. Calif., USA) flow cytometers and analyzed using FlowJo (v10.6.1, BD Biosciences, San Jose, Calif., USA).

[0540] To determine accumulation of anti-CTLA-4s on the cell surface, suspension CHO cells expressing wildtype human CTLA-4 were plated at 1×10⁶ cells/well in DPBS (Lonza, Basel, Switzerland) containing 0.5% BSA (MilliporeSigma, St. Louis, Mo., USA) and 0.5 M EDTA (MilliporeSigma, St. Louis, Mo., USA). Titrations of ipilimumab or GIGA-564 from 0-50 μg/mL were added to the cells and the plate was incubated at 37° C. for 30 minutes to allow for internalization to occur. Anti-human IgG Fc allophycocyanin (APC) (BioLegend, San Diego, Calif., USA) was added as a secondary antibody at 10 μg/mL and the plate was incubated at 4° C. for 30 minutes. Following viability staining with DAPI (BioLegend, San Diego. Calif., USA), data was acquired on the CytoFLEX LX (Beckman Coulter, Brea, Calif., USA) and analyzed using FlowJo (v10.6.1, BD Biosciences, San Jose, Calif., USA).

### Cell-Based CTLA-4 Blocking Assay

[0541] CTLA-4 Blockade Bioassay was purchased from Promega (JA3001; Madison, Wis., USA) and performed according to the manufacturer's recommendations. Briefly, a serial dilution of each antibody was generated in assay buffer (90% RPMI 1640/10% FBS, supplied in the kit) in a sterile 96-well plate. CTLA-4 effector cells (provided with kit) were thawed and diluted into 3.2 mL of assay buffer and 25 μL of the cell suspension was added to each of the inner 60 wells of a 96-well, white flat-bottom plates. 25 μL of the appropriate antibody dilutions were added to the wells containing CTLA-4 effector cells. Artificial antigen presenting (aAPC)/Raji cells (provided with kit) were thawed and diluted into 7.2 mL of assay buffer, and 25 μL of the cell suspension was added to wells containing the diluted antibodies and CTLA-4 effector cells. Plates were incubated for 6 hours at 37° C. in a tissue culture incubator with 5% CO₂ before 75 μL of Bio-Glo Reagent was added to wells containing cell and antibody mixtures. Plates were incubated for 5-15 minutes at room temperature and luminescence was measured on a Spectramax i3x plate reader (Molecular Devices, San Jose. Calif., USA). Data analysis was performed using the Softmax Pro (Molecular Devices, San Jose, Calif., USA) or Prism (GraphPad, San Diego, Calif., USA) software packages.

### CD80/CD86 Blocking ELISAs

[0542] ELISA plates (Nunc, MaxiSorp ELISA plates, flat bottom, uncoated, BioLegend, San Diego, Calif., USA) were coated with recombinant human CTLA-4-Fc (7268-CT, R&D Systems, Minneapolis, Minn., USA) at 1 μg/mL overnight at 4° C. Plates were then blocked with 5% milk in phosphate buffered saline with tween 20 (PBST) for 1 hour at room temperature. A titration series of the indicated mAbs was then added to the plates and then the plates were incubated for 1 hour at room temperature to allow mAb binding. Excess, unbound mAb was removed by washing with PBST. Recombinant human His-tagged CD80 (R&D Systems 9050-B1, Minneapolis, Minn., USA) or CD86 (R&D Systems 9090-B2, Minneapolis, Minn., USA) was then added to the plates at 1 μg/mL. After incubation for 1 hour at room temperature, the plates were washed to remove unbound ligand. Bound ligand was detected with a horseradish peroxidase (HRP)-conjugated anti-His antibody (652504, BioLegend, San Diego, Calif., USA). After incubation for 1 hour at room temperature and washing, the plates were developed with 3,3′,5,5′-Tetramethylbenzidine (TMB) substrate (34028, Pierce, Waltham, Mass., USA). After sufficient signal was achieved, development was stopped by the addition of 1 N hydrochloric acid. Absorbance at 450 nm was read using a Spectramax i3x plate reader (Molecular Devices. San Jose, Calif., USA). Half maximal inhibitory concentration (IC50) values were calculated by plotting absorbance versus the log of concentration using Prism (GraphPad, San Diego, Calif., USA).

### Murine Models

[0543] Murine experiments were done in compliance with all relevant ethical regulations and approved by the Institutional Animal Care and Use Committee of Crown Bioscience. Experiments using full-length hCTLA-4 knock-in HuGEMM™ mice (Shanghai Model Organisms Center, Inc.) were performed at Crown Bioscience (Taicang Jiangsu Province, China). Full-length hCTLA-4 knock-in HuGEMM™ mice were generated by knocking in human CTLA4 cDNA with a polyA sequence at exon 1 of the murine Ctla4 locus, replacing murine Ctla4 expression with human CTLA4 expression. Crown Bioscience acquired MC38 cells from FDCC (The Institutes of Biomedical Sciences (IBS), Fudan University, China) and RM-1 cells from SIBS (Shanghai Institutes for Biological Sciences, China) and authenticated cell line identity of research cell banks by single nucleotide polymorphism (SNP) analysis. Cell lines were mycoplasma negative. 8-12-week-old, female, full-length hCTLA-4 knock-in HuGEMM™ mice were injected subcutaneously at the right lower flank with MC38 or RM-1 cells (10⁶ cells suspended in 100 μL of PBS) as indicated for tumor development. Tumors were allowed to establish until tumor volume reached the indicated size. Mice were then randomized and dosing, as described for each experiment, was initiated on the same day as randomization. Tumor volumes and body weight were measured in a blinded fashion at least twice a week. Tumor volumes were calculated using the formula: V=(L×W×W)/2, where V is tumor volume, L is tumor length (the longest tumor dimension), and W is tumor width (the longest tumor dimension perpendicular to L). Individual animals were removed from the study as their tumor volumes measured greater than 3000 mm³. Where indicated mice with a complete response on day 35 post randomization were re-challenged on day 43. For the re-challenge experiment, MC38 tumor cells (10⁶ in 100 μL PBS) were implanted subcutaneously in the lower left (opposite) flank region. Tumor cells were also implanted in 6-8 week old naïve, WT C57BL/6 mice (Shanghai Lingchang Biotechnology Co., Ltd. (Shanghai, China)) as a positive control for tumor growth at the time of the re-challenge. Mice and any tumor progression were observed for another 30 days. Several of these experiments are previously described in Examples 4, 5, 6, 7, and 11.

[0544] Single cell suspensions from tumors were prepared using the murine tumor dissociation kit (Miltenyi, Bergisch Gladbach, Germany) and GentleMACS™ Octo Dissociator with Heaters set to the dissociation program (37_c_m_TDK_1). Single cell suspensions from lymph nodes were pushed through a 70 μm cell strainer using the plunger from a 5 mL syringe. Single cell suspensions were then incubated at room temperature with 1×RBC lysis buffer for 90 seconds. RBC lysis was then quenched, washed, strained through a 70 μm cell strainer, and counted. For cell staining cells were first blocked with 1 μg/ml Fc-Block (mouse Fc Block, BD Biosciences, San Jose, Calif., USA) for 15 minutes at 4° C. Cells were then stained with the indicated surface antibodies for 30 minutes on ice in the dark (Table 27). Cells were then washed twice and fixed with Fixation/Permeabilization working solution (eBioscience, San Diego, Calif., USA) and then washed twice with 1× Permeabilization buffer (eBioscience, San Diego, Calif., USA), after which intracellular staining was performed in 1× Permeabilization buffer. Following intracellular staining, cells were washed twice with 1× Permeabilization buffer and data was collected using a flow cytometer (LSRFortessa X-20, BD Biosciences, San Jose, Calif., USA). Data were analyzed using Kaluza or FlowJo 10.

TABLE 27
Reagent antibodies for immunophenotyping.

| Marker | Fluorochrome | Clone | Catalog | Vender |
|---|---|---|---|---|
| CD107a | FITC | 1D4B | 121606 | BioLegend |
| CD11c | FITC | N418 | 117306 | BioLegend |
| CD335 | BV605 | 29A1.4 | 137619 | BioLegend |
| (NKp46) | | | | |
| CD4 | BUV395 | GK1.5 | 563790 | BD |
| CD4 | BV421 | GK1.5 | 100438 | BioLegend |
| CD44 | BV421 | IM7 | 563970 | BD |
| CD45 | BV785 | 30-F11 | 103149 | BioLegend |
| CD62L | BV785 | MEL-14 | 104440 | BioLegend |
| CD69 | PE-Cy7 | H1.2F3 | 104512 | BioLegend |
| CD8 | PE-eFluor610 | 53-6.7 | 61-0081-82 | eBioscience |
| CD80 | APC | 16-10A1 | 560016 | BD |
| CD86 | BV605 | GL-1 | 105037 | BioLegend |
| FoxP3* | PE | FJK-16s | 12-5773-82 | eBioscience |
| hCD152 | Percp-cy5.5 | L3D10 | 349928 | BioLegend |
| (CTLA-4) | | | | |
| hCD152 | Alexa Fluor ® | L3D10 | 349920 | BioLegend |
| (CTLA-4)* | 647 | | | |
| Ki67* | Alexa Fluor ® | SolA15 | 56-5698-82 | eBioscience |
| | 700 | | | |
| Live/Dead | Ef780 | n/a | 65-0865-18 | eBioscience |
| Live/Dead | APC-eFluor | n/a | 65-0865-14 | eBioscience |
| | 780 | | | |
| TCR-beta | BUV395 | H57-597 | 742485 | BD |
| Counting beads | — | — | 01-1234-42 | Invitrogen |

*Used for internal staining

[0545] Experiments using hCTLA-4/hPD-1 double knock-in HuGEMM™ mice on the BALB/c background (GemPharmatech Co., Ltd) were generated by crossing mice in which exon 2 of murine Ctla4 was replaced with exon 2 from human CTLA4 with mice in which exon 2 and 3 of murine Pdcd1 were replaced with exon 2 and 3 of human PDCD1. The murine toxicity study using these mice was performed at Crown Bioscience (Taicang Jiangsu Province, China). Female mice were 4-5 weeks old at start of dosing and were treated with PBS, pembrolizumab (15 mg/kg), ipilimumab (10 mg/kg) plus pembrolizumab, or GIGA-564 (10 mg/kg) plus pembrolizumab every 3 days for 9 doses, and mice were euthanized 10 days after completion of dosing and tissues collected for histopathology analysis.

### Epitope Mapping

[0546] Identification of the key energetic residues involved in binding was performed by Integral Molecular (Philadelphia, Pa., USA). Full-length human CTLA-4 with a mutation to reduce internalization (Y201G) was cloned into a transient expression vector, with each extracellular position (36-161) individually mutated to alanine (or alanine mutated to serine). The mutant library was arrayed in 384-well microplates and transiently transfected into HEK-293T cells. The optimal staining concentrations of ipilimumab, GIGA-564, and L3D10 control (BioLegend, San Diego, Calif., USA) were determined using wild-type CTLA-4, then applied to the CTLA-4 mutant library. Antibody binding was detected using goat-anti-human IgG-Alexa fluor-488 or anti-human IgG F(ab′)₂-Alexa fluor-488 (Jackson ImmunoResearch, West Grove, Pa., USA), and mean cellular fluorescence was determined using flow cytometry (Intellicyt iQue, Ann Arbor, Mich., USA). Mutated residues were considered critical if mutation resulted in significant loss of binding to the test antibody compared to the control antibody. This epitope mapping experiment is also described in Example 12.

### In Vitro Treg Activation Assay

[0547] Anti-CD3 (OKT3, Ultra-LEAF purified, BioLegend, San Diego, Calif., USA) with and without CD80 (R&D Systems rhCD80-Fc, 10107-B1-100, Minneapolis, Minn., USA) were covalently linked to the surface of M-450 Tosyl beads (Dynabead M-450, 140130, Thermo Fisher Scientific, Waltham, Mass., USA) according to the manufacturer's guidelines. To confirm that the surfaces of each bead type were properly coated, fluorescent antibodies were used to detect either the mouse Fc (anti-CD3) or the CD80 on the bead surface via flow cytometry.

[0548] Donor-matched human Treg and Tconv cells (Stemcell Technologies, 70096, Vancouver, BC, Canada) were thawed and stained with CellTrace Violet (C34571, Thermo Fisher Scientific, Waltham, Mass., USA) according to the manufacturer's protocol. 10⁵ cells were then cultured with 10⁵ beads as indicated in Complete Iscove's Modified Dulbecco's Medium (IMDM, Thermo Fisher Scientific, Waltham, Mass., USA) with non-essential amino acids, sodium pyruvate, Glutamax, and 5% human antibody serum at 37° C., 5% CO₂ in a 96-well U-bottom plate (Falcon-Corning U-bottom tissue culture plates, VWR, Radnor, Pa., USA). In conditions where rhCD80-Fc (Abatacept, BMS, Princeton, N.J., USA) or aCTLA-4.28 were used, these were mixed with beads first prior to being added to the cells. Test samples with both rhCD80-Fc and aCTLA-4.28 were mixed and incubated together prior to mixing with beads and then cells. After a 4 day incubation, cells were washed, stained, and analyzed using the CytoFLEX LX (BD Biosciences, San Jose, Calif., USA). Flow cytometry data were analyzed in FlowJo v10.7.1 (BD Biosciences, San Jose, Calif., USA).

### FcR Effector Activity Bioassays

[0549] Fc effector activity bioassays for mFcγRIIIa (CS1779B08), mFcγRIV (M1151), hFcγRIIb (CS1781E02), hFcγRIIa-H variant (G9981), hFcγRIIa-R variant (CS1781B08), hFcγRIIIa-V variant (G7011), and hFcγRIIIa-F variant (G9791) were purchased from Promega Corporation (Madison, Wis., USA). The assays were carried out following the manufacturer's instructions. Briefly, CHO target cells stably expressing human CTLA-4 with the Y201G mutation to enhance cell surface expression were suspended in RPMI 1640+4% FBS media with either GIGA-564, ipilimumab, or GIGA-564 with the LALA-PG mutation to eliminate Fc function, and incubated at 37° C. for 30 minutes. The following starting concentrations and dilution factors were used for each assay: 1 μg/mL, 2.5-fold dilution series (mFcγRIIIa, hFcγRIIIa-V variant), 500 μg/mL, 2.5-fold (mFcγRIV), 3 gg/mL, 3-fold (hFcγRIIb, hFcγRIIa-H and R variant), or 10 μg/mL, 2.5-fold (hFcγRIIIa-F variant). Jurkat/NFAT-Luc effector cells solely expressing one type of FcγR were added to each well (effector:target ratio was 5:1) and incubated at 37° C. for 6 hours. Luciferase activity was measured by using the included Bio-Glo Luciferase Assay Reagent with the SpectraMax i3x or iD3 plate readers (Molecular Devices, San Jose, Calif., USA). Luciferase activity measured in relative luminescence units (RLU) were plotted against the concentration of CTLA-4 mAbs. The IC50 value of each mAb was calculated by logistic regression using Prism (GraphPad, San Diego, Calif., USA).

Determination of pH-Sensitivity of Antibodies

[0550] 96-well plates (Nunc, MaxiSorp, flat bottom, uncoated. BioLegend, San Diego, Calif., USA. 423501) were coated with 0.5 μg/mL rhCTLA-4-Fc chimera (7268-CT, R&D Systems, Minneapolis, Minn., USA) diluted in 1×PBS pH 7.0 and incubated at 2-8° C. overnight. Plates were washed with 1×PBST and blocked with PBST+1% BSA (PBSTB). Purified CTLA-4 mAbs were diluted in 10 mM sodium phosphate+150 mM NaCl adjusted to pH 4.0, 5.0, 6.0, or 7.0 then added to the plate for 1 hour. Unbound antibodies were washed away with PBST and bound antibodies detected with 0.5 μg/mL HRP-conjugated goat anti-human constant kappa (2060-05, Southern Biotech, Birmingham, Ala., USA) diluted in PBSTB. Plate was washed with PBST once more, then TMB substrate (1-Step™ Ultra TMB-ELISA Substrate Solution, Thermo Fisher Scientific, Waltham, Mass., USA) was added and developed for approximately 1 minute before stopping the reaction with 1 N HCl. Absorbance at 450 nm was measured using a spectrophotometer (i3x, Molecular Devices, San Jose, Calif., USA) and plotted using Prism (GraphPad, San Diego, Calif., USA).

### Generation of Cell Pools Stably Expressing GIGA-564

[0551] GIGA-564 was expressed from a variant of the pCDNA5/FRT mammalian expression vector (Thermo Fisher Scientific; Waltham, Mass., USA). The vector has a promoter for glutamine synthetase selection and uses an EF1a promoter to drive light chain expression, followed by a BGH polyA sequence and a CMV promoter to drive expression of the heavy chain, followed by a second BGH polyA sequence. The antibody expression construct was built using GeneBlocks (Integrated DNA Technologies, Coralville, Iowa, USA) and NEBuilder® HiFi DNA Assembly Master Mix (New England BioLabs, Ipswich, Mass., USA). The construct was amplified in NEB 10-beta E. coli and purified with the ZymoPURE™ Plasmid Maxiprep Kit (Zymo Research, Irvine, Calif., USA). It was then linearized for transfection by digesting 150 μg of DNA with 3,000 units PvuI-HF restriction enzyme (New England Biolabs, Ipswich, Mass., USA), precipitated, and washed.

[0552] Sigma Aldrich's CHOZN cells were cultured in EX-CELL CD CHO Fusion medium (MilliporeSigma, Burlington, Mass., USA) supplemented with 6 mM GlutaMAX (Gibco, Waltham, Mass., USA), shaking at 37° C., 5% CO₂, 125 RPM (25 mm throw) for 7 days prior to electroporation. The day before electroporation, suspension cells were seeded at 0.5×10⁶ viable cells/mL (vc/mL). Linearized plasmid was transfected and pulsed using CM-150 on the Amaxa 4D Nucleofector (Lonza, Basel, Switzerland) and SE Cell Line 4D Nucleofector X kit (Lonza, Basel, Switzerland). Each cuvette had 4 μg of DNA and 10⁷ CHOZN cells concentrated in SE cell solution. Post-electroporation, the transfected cells were transferred to T-75 flasks at a 2×10⁶ vc/mL density for a 1-day recovery in EX-CELL CD CHO Fusion medium (MilliporeSigma, Burlington, Mass., USA) with 6 mM GlutaMAX (Gibco; Waltham, Mass., USA). After 1-day recovery, transfected cells were pelleted and resuspended into 80% EX-CELL CD CHO Cloning medium (MilliporeSigma, Burlington, Mass., USA) and 20% EX-CELL CD CHO Fusion medium (MilliporeSigma, Burlington, Mass., USA) and plated into 96-well plates (non-TC treated, flat bottom, Greiner One-Bio, Kremsmünster, Austria) at 5,000 cell per well and incubated 37° C., 5% CO₂ with humidity.

[0553] After 4-5 weeks, confluent transfected wells (minipools) were screened for antibody concentration using the Gator bio-layer interferometry system and Protein-A biosensors (GatorBio, Palo Alto, Calif., USA). Minipools with the highest antibody titer were scaled-up using EX-CELL CD CHO Fusion medium in static 24-well TC-treated plates incubated at 37° C., 5% CO₂ with humidity. Minipools continued to expand and shaker adapted to shaking 6-well plates (non-TC treated, flat bottom, Greiner One-Bio, Kremsmünster, Austria) on a 19 mm shaking platform set at 145 RPM, 37° C., 5% CO₂, with humidity. Material from an 8-day terminal batch in 24-well plates (TC treated, flat bottom, Corning, Corning, NY, USA) was screened using the Gator system as a second method to screen minipools, in order to identify the high producers. Cultures were expanded into shaking 50 mL conical tubes (Midsci, St. Louis, Mo., USA) incubated at 37° C., 5% CO₂, 80% humidity, shaking at 225 RPM with 25 mm throw. Top minipools were combined to generate enriched pools (EPs).

[0554] EPs were cultured in shake flasks at 125 RPM, 25 mm throw, seeded at 0.2-0.4×10⁶ viable cell density (VCD)/mL for 3-4 days. EPs were then inoculated in EX-CELL Advanced Fed Batch medium at 0.4×10⁶ VCD/mL in 1 L shake flasks (Corning, Corning, NY, USA) with a vent cap and working volume of 200 mL. Incubator conditions were held constant throughout fed-batch at 37° C., 5% CO₂, 80% humidity, and shaking at 125 RPM (25 mm throw). Beginning day 3 of fed-batch to harvest, growth, viability, and metabolite concentrations were measured offline. Glucose was supplemented when concentration dropped below 4 g/L, up to 6 g/L using 45% glucose stock (Corning, Corning, NY, USA). Cultures were fed days 3, 5, 7, 9, and 11 with EX-CELL Advanced CHO Feed 1 (MilliporeSigma, Burlington, Mass., USA) (4% of working culture volume) and CellVento 4Feed COMP (MilliporeSigma, Burlington, Mass., USA) (2% of working culture volume). Cultures were harvested when viability dropped below 80% and cell culture supernatant was clarified by centrifugation and filtered. Protein was purified using Protein A eluted with 100 mM acetate pH 3. One EP was used for subsequent analysis (EP-1).

### Glycan Analysis

[0555] This analysis was performed by the CRO Bionova Scientific (Fremont, Calif., USA). 150 μg of antibody was digested with PNGase F (Prozyme. Hayward, Calif., USA) to liberate glycans. Glycans were isolated and labeled with a fluorescent molecule using a GlykoPrep InstantAB labeling kit (Prozyme, Hayward, Calif., USA) following the manufacturer's instructions. Labeled glycans were injected over a 3.5 μm, 2.1×150 mm XBridge Amide column (Waters, Milford, Mass., USA) on a UPLC (Dionex Ultimate 3000, Waters, Milford, Mass., USA) with a fluorescent detector. Peaks were identified based on known glycans from the Glyko InstantAB biantennary and high-mannose partitioned library standards (Prozyme, Hayward, Calif., USA), with the total percent of each glycoform reported as the integrated area under the identified peak divided by the sum of the AUC (area under the curve) for all peaks.

### Skin Inflammation, Colonic Epithelial and Heart Toxicity Scoring

[0556] Hematoxylin and eosin (H&E)-stained sections of skin from near the whisker region was scored as follows 1: 1-3 small foci of lymphocyte aggregates per section, 2: 4-10 small foci or 1-3 intermediate foci, 3: 4 or more intermediate or the presence of large foci, 4: marked interstitial fibrosis in parenchyma and large foci of lymphocyte aggregates.

[0557] The colonic epithelial score was determined by assessment of H&E-stained colon rolls. To determine this score, after reviewing the whole slide the four regions in which damage was most severe were selected for scoring, and the score from all four areas was added together to determine the cumulative score. To determine the score for individual areas, both the epithelial structures affected and the consistency of the damage were taken into account. For this the damage to epithelial structures was scored as 0: no lesions, 1: mucosa damage, 2: submucosa damage, 3: muscularis/serosa damage. The consistency of damage in each area was scored as 1: focal, 2: patchy, 3: diffuse. Both scores were then multiplied together to determine the area score.

[0558] For the heart pathology score, lymphocyte infiltration on H&E-stained heart sections in pericardium, right or left atrium, base of aorta, and left or right ventricle each count for 1 point each. The number of CD45⁺ cells were counted on heart formalin-fixed paraffin-embedded (FFPE) sections stained with CD45. The visual fields for inflammatory cell infiltration analysis were randomly selected, and the average score of three fields for each sample was determined.

### Kidney Pathology Staining and Scoring

[0559] Tissues were collected and were placed in 10% buffered neutral formalin and then paraffin embedded. Sectioning, staining, and scoring was performed by Allele (San Diego, Calif., USA). Briefly, blocks were cut in 5 μm sections that were placed on glass slides for anti-IgG (UltraPolymer Goat anti-Mouse heavy and light chain IgG-HRP, Cell IDx, San Diego, Calif., USA) or anti-C3 (EPR19394, Abcam, Cambridge, UK) immunohistochemistry (IHC) staining. Stained slides were prepared as digital images.

[0560] A board-certified veterinary pathologist with experience in laboratory animals and toxicologic pathology, who was blinded to the study, evaluated the anti-IgG slides for location, intensity, and percent of positive staining. Findings were scored on a scale of 1 to 4 for intensity (0: negative, 1: minimal or slightly positive, 4: very dark), and as a percent of the positive cells in the glomeruli (after reviewing at least 5 glomeruli). This experiment is also described in Example 6.

### Statistical Analysis

[0561] Comparison of changes in tumor volume measured longitudinally in multiple groups was determined using a linear mixed effects model with treatment group and day as fixed effects and animal identifier as a random effect, to account for the dependence of repeated measures. All tests were two-sided without adjustments to type I error rates. These analyses were conducted using R version 3.6.2.

[0562] For the re-challenge study, tumor volume (in mm³) was analyzed using a linear mixed effects model including treatment group and day as fixed effects and animal identifier as a random effect, to account for repeated measures. Statistical comparisons were made using the Wald test against the isotype control group for the initial challenge and against the naïve control group for the re-challenge portion of the study. All tests were two-sided with an alpha level of 0.05.

[0563] Adjusted p-values for comparison of skin inflammation, colonic epithelial damage, CD45⁺ cell infiltration into the heart, heart pathology score, colon length, spleen weight, and kidney Ig or C3 deposition were calculated using the Benjamini-Hochberg step-down procedure to account for multiple comparisons. Analyses were performed using R version 3.6.2. To determine if there was any statistical difference in the percent body weight induced by pembrolizumab or pembrolizumab plus a CTLA-4 mAb in comparison to control, a mixed effect model on change in body weight including day and treatment group as fixed effects and animal identifier as a random effect, to account for repeated measurements within animal, was used.

[0564] For flow cytometry data, the Wilcoxon rank sum test was used to determine statistical significance, with an alpha level of 0.05.

### Results

[0565] This study presented evidence that checkpoint inhibition was not a primary mechanism of action for efficacy of anti-CTLA-4 antibodies. Instead, the primary mechanism for efficacy is FcR-mediated Treg depletion in the tumor microenvironment. The study identified a monoclonal antibody (mAb) (GIGA-564) that binds to CTLA-4 at an epitope that differs from ipilimumab's by only a few amino acids, yet has limited checkpoint inhibitor activity. Surprisingly, the weak checkpoint inhibitor had superior anti-tumor activity compared to ipilimumab in a murine model. The weak checkpoint inhibitor also induced less Treg proliferation and has increased ability to induce in vitro FcR signaling and in vivo depletion of intratumoral Tregs. Further experiments showed that the enhanced FcR activity of the weak checkpoint inhibitor likely contributes to its enhanced anti-tumor activity. The results of the present study showed that weak checkpoint inhibition was associated with lower toxicity in murine models.

[0566] The results herein showed that compared to ipilimumab, the weak B7 ligand blocking anti-CTLA-4 antibody GIGA-564 induced less peripheral Treg proliferation, more efficient intratumoral Treg depletion, superior anti-tumor efficacy, and less toxicity in human CTLA4 knock-in mouse models. This work suggests a translational path forward to improve outcomes for cancer patients.

[0567] The results of the study showed that the efficacy of anti-CTLA-4 drugs is due to depletion of Tregs in the tumor microenvironment. Checkpoint inhibition by anti-CTLA-4 is not necessary and may cause toxicities.

[0568] The inventors surprisingly found that GIGA-564 is:
[0569] (1) an anti-CTLA-4 with limited checkpoint inhibitor activity, GIGA-564 has superior efficacy to ipilimumab in mouse models;
[0570] (2) induced less Treg proliferation than ipilimumab in tumor bearing mice;
[0571] (3) had superior Treg depletion in the tumor microenvironment and more efficiently depleted intratumoral CTLA-4^{Hi};
[0572] (4) improved cell signaling via interactions between CTLA-4-bound GIGA-564 and FcR; and
[0573] (5) induced less toxicity than ipilimumab in murine models expressing human CTLA-4.

### In Vitro Characterization of a Diverse Panel of Anti-CTLA-4 Antibodies

[0574] A library of natively paired single chain variable fragments (scFvs) specific to CTLA-4 were generated by immunizing Trianni Mouse® animals, which produce antibodies with fully-human variable domains and mouse constant regions; then used a proprietary microfluidics platform and yeast scFv display to select for CTLA-4 binders. Fourteen of the antibodies were cloned as full-length human IgG1 antibodies, produced in Chinese hamster ovary (CHO) cells, and were shown to bind to recombinant human CTLA-4 by surface plasmon resonance (SPR) with low nanomolar affinity (average equilibrium dissociation constant, KD: 8.7 nM), similar to that of ipilimumab (FIG. 20A-20B and Table 23).

TABLE 23
In vitro characterization of scFvs reformatted as full-length antibodies.

| | | koff | KD | MFI of | MFI of | | Cell-based | Cell-based | Cell- |
|---|---|---|---|---|---|---|---|---|---|
| | kon human | human | human | CTLA-4 + | CD27 + | KD cyno | blocking | blocking | based |
| | CTLA-4 | CTLA-4 | CTLA-4 | CHO | CHO | CTLA-4 | activity EC50 | activity max | assay |
| Antibody | (M−1 s−1) | (s−1) | (nM) | cells | cells | (nM) | (μg/mL) | signal (RLU) | plate |
| Ipilimumab | 6.50E+04 | 3.20E−04 | 4.9 | 860 | 26.6 | 1.3 | 0.34 | 307 | A |
| analog | | | | | | | | | |
| aCTLA-4.1 | 8.50E+04 | 3.90E−04 | 4.6 | 1008 | 18.6 | 1.0 | 0.10 | 349 | A |
| aCTLA-4.2 | 1.90E+05 | 2.80E−04 | 1.5 | 1050 | 18.2 | 1.2 | 0.18 | 273 | C |
| aCTLA-4.3 | 6.40E+04 | 3.60E−04 | 5.7 | 854 | 15.3 | 0.8 | 0.17 | 63 | C |
| aCTLA-4.4 | 1.00E+05 | 5.20E−04 | 5.1 | 1123 | 11.7 | 3.1 | 0.12 | 413 | A |
| aCTLA-4.9 | 2.10E+05 | 1.60E−04 | 0.77 | 1328 | 18.5 | 1.0 | 0.13 | 237 | C |
| aCTLA-4.11 | 4.20E+03 | 2.00E−04 | 48 | 219 | 14.8 | no | 0.89 | 47 | D |
| | | | | | | binding | | | |
| aCTLA-4.12 | 5.10E+04 | 2.70E−04 | 5.3 | 1013 | 17.1 | 4.5 | 2.17 | 13 | D |
| aCTLA-4.14 | 1.30E+05 | 4.20E−04 | 3.2 | 1024 | 17 | 9.6 | 0.09 | 73 | A |
| aCTLA-4.15 | 5.40E+04 | 5.20E−04 | 9.8 | 717 | 15.9 | 23.6 | 0.09 | 33 | A |
| (GIGA-564) | | | | | | | | | |
| aCTLA-4.22 | 2.30E+04 | 5.10E−04 | 22 | 641 | 15.2 | 3.1 | 0.26 | 134 | A |
| aCTLA-4.24 | 6.30E+04 | 4.30E−04 | 6.8 | 934 | 26 | 0.9 | 0.19 | 333 | B |
| aCTLA-4.26 | 6.10E+04 | 3.50E−04 | 5.7 | 939 | 17.8 | 1.6 | 0.18 | 338 | B |
| aCTLA-4.28 | 9.00E+04 | 4.20E−04 | 4.6 | 1033 | 17.2 | 2.2 | 0.18 | 548 | B |
| aCTLA-4.29 | 7.60E+04 | 2.30E−04 | 3 | 999 | 16.3 | 1.2 | 0.15 | 444 | B |

[0575] All 14 mAbs bound CHO cells stably expressing human CTLA-4, with no off-target binding to CHO cells expressing the irrelevant target CD27 (FIG. 20C and Table 23). Next, the ability of these mAbs to block interaction of CTLA-4 with its endogenous ligands (the B7 proteins CD80 and CD86) was assessed by a cell-based assay. The mAbs exhibited a variety of half maximal effective concentration (EC50, μg/mL; average: 0.34; range: 0.1-2.17), and a broad range of maximum signals (average: 240; range: 13-548), where lower values indicated less blocking (FIG. 20D and Table 23). The correlations between affinity KD and blocking EC50 or between affinity KD and blocking maximum signal were not significant (linear regression; R²=0.06 and R²=0.16, respectively; p>0.05, FIG. 20E). For this set of 14 antibodies, it was speculated that B7 ligand blocking is a function of anti-CTLA-4 binding epitope and not CTLA-4 binding affinity. Of interest, aCTLA-4.15, subsequently re-named GIGA-564, showed a combination of high affinity and low blocking maximum signal.

### FcR Effector Function is Required for the Anti-Tumor Efficacy of Ipilimumab in a Murine Model

[0576] The role of Treg depletion in the efficacy of CTLA-4 mAbs has remained controversial. Additionally, the role of the Fc effector function in the anti-tumor efficacy of ipilimumab has not been reported. Thus, the anti-tumor effect of conventional anti-CTLA-4 mAbs, including ipilimumab, was investigated in the presence and absence of Fc effector functions.

[0577] First, wild-type human IgG1 and human IgG1 N297Q mutant Fc variants of ipilimumab and another strong blocker, aCTLA-4.28 (FIG. 20 and Table 23) were generated. The N297Q mutation eliminates Fc glycosylation and the ability to bind FcRs, thus abrogating Fc effector functions such as ADCC. The CTLA-4 mAbs with the N297Q mutation were still able to bind CTLA-4⁺ CHO cells (FIG. 21). As ipilimumab does not bind murine CTLA-4, a human CTLA4 knock-in (hCTLA-4 KI) mouse model, where the human CTLA4 coding region is knocked-in to the murine Ctla4 locus, was used for in vivo efficacy studies. The majority (89.9% and 91.5%, respectively) of CD4 conventional T cells (CD4⁺FOXP3⁻) in the lymph node of hCTLA-4 KI and wildtype mice were naïve (CD44^{Lo}CD62L⁺) (FIG. 12A), suggesting that CTLA-4 is functional in hCTLA-4 KI mice. Both the ipilimumab analog and aCTLA-4.28 with a wildtype human IgG1 Fc led to strong regression of MC38 tumors (colon cancer model) in hCTLA-4 KI mice (FIG. 12B). However, in mice treated with ipilimumab_N297Q or aCTLA-4.28_N297, tumor growth was not significantly different from isotype control treated mice (FIG. 12B). These data indicated that anti-CTLA-4 mAbs, including ipilimumab, require FcR binding for anti-tumor activity and that blocking the binding of B7 ligands to CTLA-4 is not sufficient for the anti-tumor activity of anti-CTLA-4 mAbs.

GIGA-564 has Weak Ability to Block CTLA-4 from Binding to CD80/CD86

[0578] To confirm the weaker blocking ability of GIGA-564, ELISAs were performed to separately determine the ability of CD80 or CD86 to bind CTLA-4 in the presence of CTLA-4 mAbs (FIG. 13A). If binding of the mAb to CTLA-4 blocked CTLA-4 from binding to the ligand, the amount of ligand detected would decrease with increasing mAb concentration. GIGA-564 had much weaker blocking efficiency for both CD80 and CD86 than ipilimumab or aCTLA-4.28, as the curves were strongly shifted to the right (FIG. 13B and Table 24). Additionally, GIGA-564 was unable to fully block either ligand, even at the highest concentrations (FIG. 13B). This is consistent with its inability to induce full CD28 signaling in the cell-based signaling assay (FIG. 20D), which required the mAbs to strongly block binding of CTLA-4 to CD80 and CD86.

TABLE 24
GIGA-564 has minimal ability to block
CD80 or CD86 from binding CTLA-4

| | CD80 | | | CD86 | | |
|---|---|---|---|---|---|---|
| | | | IC50 | | | IC50 |
| Antibody | Max | Min | (μg/mL) | Max | Min | (μg/mL) |
| Ipilimumab | 0.96 | 0.04 | 0.07 | 1.04 | 0.09 | 0.07 |
| GIGA-564 | 0.97 | 0.18 | 2.23 | 1.07 | 0.36 | 0.30 |
| aCTLA-4.28 | 1.09 | 0.04 | 0.12 | 1.05 | 0.12 | 0.12 |

Max: maximum absorbance at 450 nm, normalized to prembrolizumab
Min: minimum absorbance at 450 nm, normalized to pembrolizumab

[0579] The key amino acids in the CTLA-4 epitope for GIGA-564 and ipilimumab were determined using the shotgun mutagenesis epitope mapping method. Epitope mapping revealed that GIGA-564 and ipilimumab have overlapping but distinct epitopes. In particular K130, Y139, L141, and I143 are key amino acids that are part of the epitope for both GIGA-564 and ipilimumab (FIG. 13C-13D). However, R70 is a key amino acid for the epitope of ipilimumab but not GIGA-564 (FIG. 13C-13D). Importantly, R70 is also important for CD80 and CD86 binding to CTLA-4 (FIG. 13D). It was speculated that R70 on CTLA-4 may be more available to bind CD80 and CD86 when CTLA-4 is bound by GIGA-564 compared to ipilimumab, explaining why GIGA-564 only minimally blocks CD80/CD86 binding to CTLA-4.

### GIGA-564 Treatment Induces Anti-Tumor Responses in Murine Models

[0580] The anti-tumor efficacy of GIGA-564 was tested. Both GIGA-564 and commercial ipilimumab led to nearly complete control of MC38 tumors in hCTLA-4 KI mice when they were dosed at 5 mg/kg twice a week (FIG. 14A). Similarly, in hCTLA-4 KI mice bearing RM-1 tumors (prostate cancer model), which are more resistant to anti-CTLA-4, GIGA-564 led to similar tumor growth inhibition to commercial ipilimumab when dosed at 5 mg/kg on days 0, 3, and 6 (FIG. 14B). Thus, it was found that anti-CTLA-4 anti-tumor activity is independent of checkpoint inhibition via CTLA-4 blocking in multiple tumor models.

[0581] Highly efficacious dosing of anti-CTLA-4 mAbs at 5 mg/kg made it difficult to identify any potential difference in the anti-tumor efficacy of ipilimumab and GIGA-564. Therefore, the ability of 0.3 mg/kg of ipilimumab or GIGA-564 to control progression of MC38 tumors in hCTLA-4 KI mice was assessed. GIGA-564 was more effective in limiting tumor progression than commercial ipilimumab at this low dose (FIG. 14C).

### GIGA-564 Induces Less Peripheral Treg Proliferation and Efficiently Depletes Intratumoral Tregs

[0582] Tregs stimulated via CD3/CD80 proliferate more than Tregs stimulated via CD3 alone, and CTLA-4 blockade overcomes inhibition by exogenous CTLA-4-Fc (FIG. 22). In agreement with this, blocking or acute loss of CTLA-4 enhances Treg proliferation in vivo. Thus, it was hypothesized that GIGA-564 would induce less Treg proliferation than ipilimumab. To test this possibility, hCTLA-4 KI mice bearing established MC38 tumors were treated with mAbs at 5 mg/kg on days 0, 3, and 6 and analyzed the proliferation status of peripheral T cell subsets from a non-draining lymph node on day 7 (FIG. 15A). This analysis revealed that ipilimumab increased the proliferation of Tregs more than it increased the proliferation of conventional T cells (Tconv) or CD8 T cells (FIG. 15A). Furthermore, GIGA-564 induced significantly less peripheral Treg proliferation than ipilimumab (FIG. 15A; Wilcoxon rank sum test, p=<0.05). These data are consistent with the in vitro data that showed that GIGA-564 only weakly blocks the interaction of CTLA-4 with its B7 ligands (FIG. 13B, FIG. 20D, and Table 23).

[0583] Intratumoral Tregs express more surface CTLA-4 than effector T cells or even peripheral Tregs. Thus, as FcR effector function activity of antibodies is dependent on the amount of antibody that binds to the cell surface, CTLA-4 mAbs selectively deplete intratumoral Tregs. Furthermore, antibody-mediated depletion of CTLA-4^{Hi} Tregs in the tumor microenvironment (TME) has been shown to begin within the first 24 hours after antibody administration. Thus, to determine the ability of GIGA-564 to deplete intratumoral Tregs hCTLA-4 KI mice bearing established MC38 tumors were treated with 5 mg/kg of isotype, ipilimumab, or GIGA-564 and then analyzed Treg populations in the periphery and tumor by flow cytometry 1 day later. It was found that both anti-CTLA-4 antibodies depleted intratumoral Tregs (Wilcoxon rank sum test, p<0.05) but not peripheral Tregs (FIG. 15B; Wilcoxon rank sum test, p>0.05). It was also found that for animals administered GIGA-564, the population of remaining intratumoral Tregs had a lower CTLA-4 mean fluorescence intensity (MFI) than analogous populations from animals administered ipilimumab (FIG. 15C-15D; Wilcoxon rank sum test, p<0.05). Additionally, GIGA-564 weakly enhanced the intratumoral CD8/Treg ratio compared to ipilimumab (FIG. 15E). GIGA-564 was more effective at depleting CTLA-4^{Hi} intratumoral Tregs, which in addition to the reduced Treg proliferation induced by GIGA-564, may explain why GIGA-564 is superior at controlling tumor growth at low doses than ipilimumab. The results show that GIGA-564 eliminates intratumoral Tregs. Human CTLA-4 knock-in mice bearing MC38 tumors were treated with 5 mpk of ipilimumab or GIGA-564 and sacrified 1 day later. Flow cytometry showed that GIGA-564 is more efficient than ipilumab at depleting CTLA-4+ Tregs in the tumor microenvironment.

[0584] Additional flow analysis of the TME or peripheral lymph node of hCTLA-4 KI mice with established MC38 tumors treated with 2 or 3 doses of GIGA-564 or ipilimumab was performed (harvesting on day 4 or 7, respectively). Even with additional treatments, both GIGA-564 and ipilimumab were able to specifically deplete intratumoral Tregs but not peripheral Tregs (FIG. 23).

GIGA-564 Induces More FcR Signaling than Ipilimumab

[0585] The increased efficacy of low dose GIGA-564 compared to ipilimumab (FIG. 14C) may be in part due to the enhanced ability by which GIGA-564 depletes CTLA-4^{Hi} intratumoral Tregs (FIG. 15C-15E). To investigate this, the ability of GIGA-564 and ipilimumab to induce mouse FcR signal transduction were compared. It was found that GIGA-564 resulted in more FcR signaling than ipilimumab in Jurkat effector cells expressing murine FcγRIV, but not FcγRIII, when co-cultured with CHO cells stably expressing CTLA-4 (FIG. 16A and Table 25). This increased FcγRIV signaling induced by GIGA-564 may explain why GIGA-564 more efficiently depletes intratumoral Tregs than ipilimumab.

TABLE 25
Fc receptor signaling of GIGA-564 and ipilimumab

| | Maximum luminescence (RLU) | | | EC50 (μg/mL) | |
|---|---|---|---|---|---|
| | | GIGA- | GIGA- | | GIGA- |
| FcR assay | Ipilimumab | 564 | 564_LALAPG | Ipilimumab | 564 |
| mFcyRIV | 990 | 2,557 | 297 | 2.21 | not determined* |
| mFcYRIII | 17,496 | 14,311 | 1,163 | 0.22 | 0.15 |
| hFcyRIIIa-V | 59,205 | 87,184 | 4,255 | 0.04 | 0.02 |
| hFcyRIIIa-F | 6,880 | 15,818 | 2,434 | 0.09 | 0.04 |
| hFcyRIIa-H | 973 | 802 | 210 | 0.05 | 0.04 |
| hFcyRIIa-R | 2,641 | 2,560 | 1,572 | 0.21 | 0.08 |
| hFcyRIIb | 5,801 | 5,173 | 978 | 0.17 | 0.11 |

*GIGA-564 EC50 not determined due to poor curve fit

[0586] As the increased murine FcγRIV signaling induced by GIGA-564 may contribute to the enhanced depletion of intratumoral Tregs and efficacy induced by GIGA-564 in hCTLA-4 KI MC38 tumor-bearing mice, it was important to determine if GIGA-564 also induces more human FcR signal transduction. It was found that GIGA-564 induced more human FcγRIIIa signaling than ipilimumab (FIG. 16B and Table 25). However, the increased FcR signaling induced by GIGA-564 was FcR-specific (FIG. 16C-16D and Table 25). From a translational perspective, GIGA-564 may have increased ability to induce FcR signaling and thus FcR effector functions in patients, especially if expression of FcγRIIIa is used as a biomarker.

[0587] It has previously been suggested that CTLA-4 mAbs with reduced binding at lower pH have enhanced ability to accumulate on the surface of Tregs because they dissociate from CTLA-4 in the early endosome. The hypothesis is that reduced binding at low pH allows for more CTLA-4 recycling, and thus more total CTLA-4 surface expression. A CTLA-4 mAb with reduced binding at low pH would selectively bind CTLA-4 in the periphery over CTLA-4 in the TME. Since the purpose of this study was to generate a CTLA-4 mAb that would target intratumoral Tregs, it was determined the pH sensitivity of several CTLA-4 mAbs and found that GIGA-564 similarly bound to CTLA-4 at all tested pHs, including the at lower pHs often present in the TME (FIG. 24A).

[0588] FcR signaling can also be affected by several other factors including the amount of antibody that accumulates on the cell surface and the affinity of the Fc portion of mAb to FcRs. No evidence was found that more GIGA-564 accumulates on the surface of CTLA-4⁺ cells than ipilimumab (FIG. 24B). The affinity of an Fc for FcγRIIIa is in part controlled by Fc glycosylation, specifically Fc fucosylation, because afucosylation enhances the affinity of the Fc for FcγRIIIa and thus ADCC. It was found that GIGA-564 transiently expressed in ExpiCHO cells was less fucosylated than ipilimumab, while a CHO cell pool stably expressing GIGA-564 produced material that was 95% fucosylated (FIG. 24C). Human FcγRIIIa assays revealed that the amount of GIGA-564 afucosylation in each preparation correlated with FcγRIIIa signaling (FIG. 24D). Accordingly, an afucosylated form of GIGA-2328 has been generated as described in Example 17.

[0589] Further investigation revealed that GIGA-564 still demonstrates higher FcR activity than ipilimumab, even in the context of decreased afucosylation (FIG. 24E). The increased FcR activity of GIGA-564 likely contributes to its enhanced anti-tumor efficacy, and this may translate well to patients as GIGA-564 also induces enhanced human FcγRIIIa signaling.

### GIGA-564 Induces Durable Anti-Tumor Immune Responses

[0590] While first generation anti-CTLA-4s led to durable anti-tumor immunity, little is known about the ability of an anti-CTLA-4 with minimal blocking activity to induce a durable anti-tumor immune response. To investigate this translationally important question, hCTLA-4 KI mice bearing established MC38 tumors were treated on days 0, 3, and 6 with control (isotype), ipilimumab, or GIGA-564 at 1 mg/kg, an FDA-approved dose of ipilimumab that induced a durable complete response in approximately 50% of animals (5/8 ipilimumab treated animals and 5/9 GIGA-564 treated animals) (FIG. 6A). Animals with a complete response on day 43 were then re-challenged with MC38 tumor cells on the opposite flank from the original tumor site. All durable complete responders in the group previously treated with commercial ipilimumab and 4/5 of the durable complete responders in the group previously treated with GIGA-564 did not develop tumors at the re-challenge site (FIG. 17B). Thus, GIGA-564, an anti-CTLA-4 with minimal blocking activity, leads to durable anti-tumor immunity by preventing tumor development at a distant site.

GIGA-564 Induces Less Toxicity than Ipilimumab in Murine Models

[0591] In the clinic, CTLA-4 antibodies are most frequently used in combination with PD-1 antibodies, but this combination can induce relatively high frequency of severe adverse events. Thus, a CTLA-4 mAb with enhanced efficacy and reduced toxicity would be beneficial to patients. Several lines of evidence reveal that a significant portion of the toxicities induced by conventional CTLA-4 mAbs likely arises through blocking CTLA-4 from binding CD80 and CD86. This suggests that a CTLA-4 mAb with minimal blocking activity would not only have enhanced anti-tumor efficacy but may also result in less toxicity. Accordingly, the toxicity induced by ipilimumab and GIGA-564 was compared in the presence of anti-PD-1.

[0592] hCTLA-4 KI mice treated with a CTLA-4 mAb have been shown to recapitulate some of the toxicity induced by CTLA-4 mAbs in patients, and repeated treatment of BALB/c mice with anti-mouse CTLA-4 antibodies was shown to induce intestinal inflammation.

[0593] Thus, in the present study, hCTLA-4/hPD-1 double knock-in mice on the BALB/c background were treated with vehicle, pembrolizumab, pembrolizumab plus ipilimumab, or pembrolizumab plus GIGA-564 every 3 days for 9 doses (FIG. 18A). One week after the last dose, mice were euthanized and tissues were collected for pathology analysis (FIG. 18B-18C and FIG. 25A-25B). Histopathological analysis revealed that pembrolizumab plus ipilimumab, but not pembrolizumab plus GIGA-564, induced more colonic epithelial damage and skin inflammation than vehicle treated mice or mice treated with pembrolizumab alone (FIG. 18B-18C), while both combination treatments led to a minor increase in immune cell infiltration to the heart (FIG. 25C-25D). As CTLA-4 mAbs have been shown to induce kidney deposition in hCTLA-4 KI mice on the C57BL/6 background, kidneys were collected on day 20 post initiation of treatment from hCTLA-4 KI mice bearing MC38 tumors treated with vehicle, 5 mg/kg ipilimumab, or 5 mg/kg GIGA-564 twice a week for 5 doses (FIG. 14A). Kidneys were processed into formalin fixed paraffin embedded (FFPE) blocks. FFPE sections were stained for anti-mouse immunoglobin and scored by a board-certified veterinary pathologist blinded from the study. Ipilimumab, but not GIGA-564, significantly increased the percent of glomeruli with murine Ig deposition (FIG. 25E), suggesting that ipilimumab induces more kidney damage than GIGA-564 in hCTLA-4 KI mice. Thus, GIGA-564 induces less toxicity than ipilimumab in these murine models.

[0594] In conclusion, GIGA-564 is a novel CTLA-4 mAb with minimal B7 ligand blocking activity resulting in enhanced efficacy but reduced toxicity in multiple murine models (FIG. 19), suggesting that reducing CTLA-4 checkpoint inhibition yields translationally relevant benefits for both efficacy and safety.

[0595] It was shown herein that GIGA-564, an anti-CTLA-4 with minimal ability to block CTLA-4 binding to its CD80/CD86 ligands and enhanced FcR activity, had superior anti-tumor activity and reduced toxicity compared to ipilimumab in murine models expressing human CTLA-4. It was found that in hCTLA-4 KI mice, ipilimumab enhanced Treg proliferation more than proliferation of CD4⁺FOXP3⁻ or CD8 T cells. GIGA-564 leads to less Treg proliferation and increased anti-tumor activity in a murine model when compared to the first generation anti-CTLA-4 mAb ipilimumab.

[0596] It has recently been suggested that anti-CTLA-4-mediated depletion of intratumoral Tregs may be transient, explaining why intratumoral Treg depletion is not obvious at all timepoints following anti-CTLA-4 therapy. Thus, one possibility is that anti-CTLA-4 mediated expansion of peripheral Tregs provides a reservoir that reseeds the intratumoral Treg niche. Additionally, while anti-CTLA-4 mAbs efficiently induce depletion of intratumoral Tregs in the MC38 model primarily used here, the ability of anti-CTLA-4s to deplete intratumoral Tregs in patients is expected to be variable. This is because the expression of CTLA-4 by intratumoral Tregs varies among and within patients as can the affinity of FcRs, which are able to mediate antibody-dependent killing of CTLA-4^{Hi} Tregs. Furthermore, GIGA-564 may synergize well with anti-PD-1s, because it would be expected to deplete the intratumoral Tregs an anti-PD-1 could induce.

[0597] Several lines of evidence suggest that blocking the ability of CTLA-4 to bind CD80/CD86 may strongly contribute to the severe adverse events induced by first generation CTLA-4 mAbs. First, CTLA4 mutations in humans that decrease binding of CTLA-4 to its B7 ligands are associated with immune infiltration into the brain, gastrointestinal tract, and lung, and can result in diarrhea, colitis, lymphocytic interstitial lung disease, and occasionally autoimmune thyroiditis. Clinically it has also been reported that the gastrointestinal biopsies of CHAI patients (CTLA-4 haploinsufficiency with autoimmune infiltration) are reminiscent of patients treated with anti-CTLA-4 blocking antibodies. Other relevant clinical data has been reported after treatment with abatacept (CTLA-4-Ig), which strongly binds the B7 proteins CD80 and CD86. This study found that pembrolizumab plus GIGA-564 induced less colonic epithelial damage and skin pathology than pembrolizumab plus ipilimumab in human CTLA-4/PD-1 double knock-in mice on the BALB/c background. Gastrointestinal and dermatological adverse events in patients are among the most common severe adverse events associated with ipilimumab or ipilimumab plus anti-PD-1 therapy.

[0598] Thus, the data shown herein suggested that clinical translation of GIGA-564 may result in reduced rates of these adverse events commonly associated with conventional CTLA-4 mAbs and thus benefit patients.

[0599] Surprisingly, it was found that GIGA-564 has enhanced FcR activity in vitro and in vivo. As next-generation anti-CTLA-4s with enhanced FcR activity have improved anti-tumor efficacy, it is likely that the enhanced FcR activity of GIGA-564 contributes to the improved anti-tumor efficacy of this mAb. The data presented herein indicate that the enhanced FcR function of transiently produced GIGA-564 can be due to the partially afucosylated status of this material; however, further investigation revealed that GIGA-564 still demonstrated higher human FcγRIIIa activity even in the context of decreased afucosylation, suggesting that our results will translate to patients. Of note, the GIGA-564 material used in the murine toxicity study had relatively high levels of afucosylation (80.9%) and Fc effector function, further emphasizing the role of checkpoint inhibition in the induction of adverse events induced by conventional anti-CTLA-4 mAbs.

[0600] Another strategy that has been reported to enhance FcR function of CTLA-4 mAbs is selection of mAbs that dissociate from CTLA-4 at acidic pHs, leading to enhanced recycling of CTLA-4 and thus accumulation of the anti-CTLA-4 mAb on the cell surface. However, the tumor microenvironment is often acidic, and thus anti-CTLA-4s that preferentially bind at neutral pH will be less able to bind CTLA-4 in the tumor microenvironment, precisely where it was aimed to selectively deplete Tregs. Importantly, GIGA-564 was able to bind to CTLA-4 efficiently at low pH and can thus target intratumoral Tregs.

[0601] It has been argued that the FcR-dependent activity of anti-CTLA-4s may result from FcRs holding CTLA-4 away from the immune synapse and thus serves to further functionally inhibit the CTLA-4/B7 immune checkpoint. As CTLA-4 is most highly expressed by Tregs and co-stimulation is also important for Treg proliferation, anti-CTLA-4s that block the ability of CTLA-4 to bind its B7 ligands induce significant Treg proliferation. Thus, the fact that GIGA-564 only weakly blocks the ability of CTLA-4 to bind its B7 ligands and has enhanced FcR activity but induces less Treg proliferation than ipilimumab, suggests that the Fc activity of anti-CTLA-4s play little role in the inhibiting the ability of anti-CTLA-4s to bind its B7 ligands.

[0602] In conclusion, the inventors of the present application showed that the weak blocking CTLA-4 mAb GIGA-564 reduced proliferation of peripheral Tregs, more efficiently depleted intratumoral CTLA-4^{Hi}, and had superior anti-tumor activity while inducing less toxicity than ipilimumab in murine models expressing human CTLA-4.

### 8.15. Example 14: Development and Validation of CHO Cells Expressing Cyno CTLA-4 on the Cell Surface

[0603] To determine the ability of GIGA-564 vs ipilimumab (Ipi) to bind cynomolgus CTLA-4 on the cell surface, CHO cells stably expressing cynomolgus CTLA-4 (cyno CTLA-4) or human CTLA-4 (hCTLA-4) were generated.

[0604] The ability of PE-labeled anti-CTLA-4 antibodies, clones L3D10 or BNI3, to bind to cyno CTLA-4 or hCTLA-4+ CHO cells was tested to validate the expression of cyno CTLA-4 or hCTLA-4 on the surface of these cells.

[0605] In this experiment, parental CHO cells and cyno CTLA-4 CHO cells or hCTLA-4 CHO cells (1E6 cells each cell line) were first washed with MACS buffer (DPBS+0.5% BSA+2 mM EDTA) and then incubated with either PE-labeled anti-CTLA-4 clones L3D10 or BNI3. Afterwards, the cells were washed twice with MACS buffer to remove excess, unbound antibody. Then, binding of mAbs to cyno or human CTLA-4 on the cell surface was analyzed by flow cytometry (FIG. 34). Flow histograms of FIG. 34 show that the cyno CTLA-4 and hCTLA-4 CHO cell lines express antigen on the cell surface bound by anti-CTLA-4 clone L3D10 or BNI3, this validates expression of cyno or human CTLA-4 on the surface of these cell lines, respectively.

### 8.16. Example 15: GIGA-564 has Reduced Ability to Bind Cyno CTLA-4 Compared to Ipilimumab

[0606] To determine the ability of GIGA-564 to bind to cynomolgus (cyno) and human CTLA-4 expressed on the surface of mammalian cells, parental CHO cells and cyno CTLA-4 CHO cells or hCTLA-4 CHO cells (1E6 cells each cell line) were first washed with MACS buffer (DPBS+0.5% BSA+2 mM EDTA) and then incubated with 10 ug/mL of Ipilimumab, Atezolizumab (negative control), or GG-564 at 4° C.

[0607] Afterwards, the cells were washed twice with MACS buffer to remove excess, unbound antibodies. The cells were then stained with PE-labeled rat anti-human IgG Fc antibody to detect bound human antibodies. After staining, the cells were washed twice with MACS buffer to remove excess, unbound PE-conjugated anti-human antibodies. Then, binding of mAbs to cyno or human CTLA-4+ CHO cells was analyzed by flow cytometry. FIG. 35 shows that while GIGA-564 and Ipilimumab (Ipi) have relatively similar ability to bind hCTLA-4; compared to Ipi, GIGA-564 has a greatly reduced ability to bind to cyno CTLA-4 expressed on the cell surface. The results suggest that Ipi and GIGA-564 bind to different CTLA-4 epitopes.

[0608] Next, the ability of GIGA-564 to bind recombinant cynomolgus monkey CTLA-4 (rcmCTLA-4) was tested by ELISA.

[0609] In these ELISAs binding of GIGA-564 to various CTLA-4 proteins sourced from multiple manufacturers, including Fc chimera and his-tagged formats, was tested. To test the binding of GIGA-564 to Fc chimera CTLA-4 proteins, rcmCTLA-4-Fc from R&D systems (9336-CT-200, FIG. 36A), Sino Biological (90213-C02H, FIG. 36B), or ACROBiosystems (CT4-C5256, FIG. 36C) were coated at 1 ug/mL on one half of separate ELISA plates. Recombinant human CTLA-4-Fc (rhCTLA-4) from R&D Systems (7268-CT-100, FIGS. 36A-36C) was coated at 1 ug/mL, on the other half of each of the plates. Similarly, to test the binding of GIGA-564 to his-tagged CTLA-4, rcmCTLA-4-His from Sino Biological (90213-C08H, FIG. 36D) or ACROBiosystems (CT4-C5227, FIG. 36E) were coated at 1 ug/mL on one half of separate ELISA plates. RhCTLA-4-Fc (ACROBiosystems, CT4-H5229, FIGS. 36D-E) was coated at 1 ug/mL, on the other half of each of these plates. After coating, the plates were incubated overnight at 4° C.

[0610] The following day, the plates were blocked with 5% milk in PBST for 1 hour on a plate shaker at room temperature. Titration series of Ipilimumab, Atezolizumab (negative control), and GG-564 (starting at 5 ug/mL) were added to the plates and incubated on a plate shaker for 1 hour at room temperature to allow mAb binding. Excess, unbound mAbs were removed by washing with PBST. Bound mAbs were then detected with an HRP-conjugated anti-kappa light chain antibody (0.5 ug/ml, Southern Biotech 2060-50). After incubation on a plate shaker for 1 hour at room temperature and washing, the plates were developed with TMB substrate. After sufficient signal was achieved, 1 N hydrochloric acid was added to stop development. Absorbance at 450 nm was read using a Spectramax i3x plate reader (Molecular Devices). EC50 values were calculated by plotting absorbance vs. the log of concentration using Prism (GraphPad). As Ipi has similar binding to human and cyno CTLA-4, in most cases, GIGA-564 had reduced ability to bind cyno CTLA-4 compared to human CTLA-4. These results suggest that the Ipi and GIGA-564 epitopes are different in practice.

[0611] Table 28 shows the EC50 values and fold change for each antibody tested in the ELISA assays.

TABLE 28

| | | | Fold |
|---|---|---|---|
| mAb | Antigen | EC50 | Change* |
| GG-564 | R&D rcmCTLA-4 Fc | 1.71** | 126 |
| GG-564 | R&D rhCTLA-4 Fc | 0.0136 | |
| Ipilimumab | R&D rcmCTLA-4 Fc | 0.0111 | 1.2 |
| Ipilimumab | R&D rhCTLA-4 Fc | 0.0092 | |
| GG-564 | Sino Biological rcmCTLA-4 Fc | 1.7290** | 170 |
| GG-564 | R&D rhCTLA-4 Fc | 0.0102 | |
| Ipilimumab | Sino Biological rcmCTLA-4 Fc | 0.0112 | 1.6 |
| Ipilimumab | R&D rhCTLA-4 Fc | 0.0070 | |
| GG-564 | ACROBiosystems rcmCTLA-4 Fc | 2.43** | 254 |
| GG-564 | R&D rhCTLA-4 Fc | 0.0096 | |
| Ipilimumab | ACROBiosystems cCTLA-4 Fc | 0.0077 | 1.3 |
| Ipilimumab | R&D rhCTLA-4 Fc | 0.0060 | |
| GG-564 | Sino Biological rcmCTLA-4 His | 0.5117 | 10 |
| GG-564 | ACROBiosystems rhCTLA-4 His | 0.0496 | |
| Ipilimumab | Sino Biological rcmCTLA-4 His | 0.0118 | 0.6 |
| Ipilimumab | ACROBiosystems rhCTLA-4 His | 0.0203 | |
| GG-564 | ACROBiosystems rcmCTLA-4 His | 2.65** | 57 |
| GG-564 | ACROBiosystems rhCTLA-4 His | 0.0468 | |
| Ipilimumab | ACROBiosystems rcmCTLA-4 His | 0.0226 | 1.3 |
| Ipilimumab | ACROBiosystems rhCTLA-4 His | 0.0176 | |

*fold change: EC50 of cyno divided by EC50 of human
**did not reach signal saturation

### 8.17. Example 16: Fucosylation Analysis of GIGA-564, GIGA-2328, and Ipilimumab

[0612] Table 30 shows a fucosylation analysis of GIGA-564 and Ipiliumumab produced with unmanipulated fucosylation, and Table 31 shows a fucosylation analysis of GIGA-564 and Ipiliumumab produced with conditions to promote afucosylation. Each antibody was digested with PNGase F to liberate glycans. Glycans were isolated and labeled with a fluorescent molecule using a GlykoPrep InstantAB labeling kit (Prozyme) following the manufacturer's instructions. Labeled glycans were injected over a XBridge Amide column on an Ultra Performance Liquid Chromatography (UPLC) system with a fluorescent detector. Peaks were identified based on known glycans from the Glyko InstantAB biantennary and high-mannose partitioned library standards (Prozyme), with the total percent of each glycoform reported as the integrated area under the identified peak divided by the sum of the area under the curve for all peaks. Each value represents and independent measurement of the indicated lot. If more than one measurement was made, the minimum, maximum, and mean values are also provided.

TABLE 30
Fucosylation analysis of GIGA-564 and Ipiliumumab produced with unmanipulated fucosylation

| GIGA-564 (transient | | GIGA-564 (stable | | Ipilimumab (transient | | Ipilimumab (stable | | | |
|---|---|---|---|---|---|---|---|---|---|
| expression) | | expression) | | expression) | | expression) | | Ipilimumab (Yervoy) | |
| | % fucosylated | | % fucosylated | | % fucosylated | | % fucosylated | | % fucosylated |
| min | 77.4 | min | 81.6 | min | 82.7 | min | 88.0 | min | 88.4 |
| max | 80.9 | max | 95.0 | max | 83.5 | max | 88.3 | max | 89.7 |
| average | 79.4 | axerage | 90.3 | average | 83.1 | average | 88.2 | average | 89.1 |
| Lot | % fucosylated | Lot | % fucosylated | Lot | % fucosylated | Lot | % fucosylated | Lot | % fucosylated |
| PN- | 80.9 | PN- | 95.0 | PN- | 82.7 | PN- | 88.3 | PN- | 89.1 |
| 2758.01 | | 4261.01 | | 4265.01 | | 4489 | | 4094 | |
| PN- | 77.4 | PN- | 94.3 | PN- | 83.5 | PN- | 88.0 | PN- | 89.4 |
| 4088.01 | | 4261.02 | | 4265.01 | | 4532.01 | | 2167 | |
| PN- | 79.8 | PN- | 89.9 | | | | | PN- | 88.8 |
| 2758.01 | | 4262.01 | | | | | | 2753 | |
| | | PN- | 92.0 | | | | | PN- | 88.4 |
| | | 4324.01 | | | | | | 4094 | |
| | | PN- | 91.6 | | | | | PN- | 89.7 |
| | | 4324.01 | | | | | | 4094 | |
| | | PN- | 85.5 | | | | | | |
| | | 4554.01 | | | | | | | |
| | | PN- | 81.6 | | | | | | |
| | | 4555.01 | | | | | | | |
| | | PN- | 91.2 | | | | | | |
| | | 4324.01 | | | | | | | |
| | | PN- | 91.4 | | | | | | |
| | | 4324.02 | | | | | | | |

Some of the data shown in Table 30 is also provided in Example 13.

TABLE 31
Fucosylation analysis of GIGA-564 and Ipiliumumab
produced with conditions to promote afucosylation

| GIGA-564 (transient | | GIGA-564 (stable | | Ipilimumab (transient | | Ipilimumab (stable | |
|---|---|---|---|---|---|---|---|
| expression) | | expression) | | expression) | | expression) | |
| Lot | % fucosylated | Lot | % fucosylated | | % fucosylated | | % fucosylated |
| PN- | 5.2 | PN- | 25.1 | min | 5.2 | min | 3.3 |
| 2328.01 | | 4534.01 | | | | | |
| | | | | max | 6.3 | max | 3.9 |
| | | | | average | 5.9 | average | 3.6 |
| | | | | Lot | % fucosylated | Lot | % fucosylated |
| | | | | PN- | 5.2 | PN- | 3.3 |
| | | | | 2326.01 | | 4491.01 | |
| | | | | PN- | 6.3 | PN- | 3.9 |
| | | | | 4266.01 | | 4533.01 | |
| | | | | PN- | 6.2 | | |
| | | | | 4266.01 | | | |

[0613] GIGA-2328 was designed to have low fucosylation for the purpose of enhancing FcγRIIIa signaling. As shown in FIG. 41, an ADCC reporter bioassay for human FcγRIIIa, V variant (G7011) from Promega Corporation was carried out following the manufacturer's instructions. Briefly, CHO target cells stably expressing human CTLA-4 with the Y201G mutation to enhance cell surface expression were suspended in RPMI 1640+4% FBS media with the indicated antibody and incubated at 37° C. for 30 minutes. Jurkat/NFAT-Luc effector cells expressing human FcγRIIIa, V variant were added to each well at an effector:target ratio of 5:1 and incubated at 37° C. for 6 hours. Luciferase activity was measured by using the included Bio-Glo Luciferase Assay Reagent with the SpectraMax i3x reader. Luciferase activity measured in relative luminescence units (RLU) were plotted against the concentration of antibody.

TABLE 34
GIGA-2328 has lower overall fucosylation than GIGA-564.

| Glycoform | GIGA-564 | GIGA-2328¹ | GIGA-2328² |
|---|---|---|---|
| fucosylated | 91.6 | 5.2 | 25.1 |
| afucosylated | 7.2 | 91.6 | 74.0 |
| G0-GlcNac | 0.4 | 7.5 | 1.4 |
| G0F-GlcNac | 0.6 | 0.6 | 0.3 |
| G0 | 3.9 | 55.5 | 60.2 |
| G0F | 64.1 | 2.9 | 19.4 |
| Man5/G1-1* | 2.8 | 11.7 | 8.3 |
| G1-2 | | | 3.5 |
| G1F-1 | 17.7 | 1.0 | 3.5 |
| G1F-2 | 7.0 | 0.7 | 1.5 |
| G2 | | | 0.6 |
| Man6 | 0.1 | 6.3 | |
| G2F | 2.2 | | 0.4 |
| Man7 | | 4.2 | |
| Man8 | | 4.3 | |
| Man9 | | 2.0 | |
| Unknown | 1.1 | 3.2 | 0.9. |

¹antibody was expressed by transient transfection in ExpiCHO cells (Thermo Fisher)
²antibody was stably expressed in the CHOZN cell line (Sigma Aldrich)
*in some cases separate values for Man5/G1-1 were summed to calculate this value.
Some data in Table 34 includes repeated data shown in Table 30 and Table 31.

[0614] Each antibody was digested with PNGase F to liberate glycans. Glycans were isolated and labeled with a fluorescent molecule using a GlykoPrep InstantAB labeling kit (Prozyme) following the manufacturer's instructions. Labeled glycans were injected over a XBridge Amide column on an Ultra Performance Liquid Chromatography (UPLC) system UPLC with a fluorescent detector. Peaks were identified based on known glycans from the Glyko InstantAB biantennary and high-mannose partitioned library standards (Prozyme), with the total percent of each glycoform reported as the integrated area under the identified peak divided by the sum of the area under the curve for all peaks

[0615] FIGS. 42A-42B. GIGA-564 induces antibody-dependent cellular cytotoxicity (ADCC) and/or antibody-dependent cellular phagocytosis (ADCP) by human PBMCs against a target cell line expressing CTLA-4. Cryopreserved human PBMCs from two donors were thawed and recovered overnight in RMPI media containing 100 U/mL IL-2 and 10% FBS. CHO target cells stably expressing human CTLA-4 with the Y201G mutation to enhance cell surface expression were stained with CellTrace Violet (Thermo Fisher), then incubated with either GIGA-564 or a human IgG1 isotype control at the indicated concentrations at 37° C. for 30 minutes. PMBC effector cells were then added at a 20:1 effector to target ratio and the samples were incubated at 37° C. for 4 hours to allow for ADCC. The samples were then washed with MACS buffer, stained with the viability dye 7-Aminoactinomycin D (7-AAD) to label dead cells, and analyzed by flow cytometry. (FIG. 42A) Representative gating strategy to determine ADCC. Samples were first gated for target cells (CellTrace Violet+), then single cells, then dead (7-AAD+) cells. (FIG. 42B) Plots of percent dead cells at each concentration of GIGA-564 and human IgG1 isotype. GIGA-564 leads to higher percent dead CTLA-4+ target cells than the isotype control.

### 8.18. Example 17: Effect of Different IgG1 Allotypes on FcγRIIIa Signaling

[0616] IgG1 allotype may impact signaling via the FcγRIIIa receptor. FIG. 43A shows sequence information of IgG1 allotype IGHG1*08 and IGHG1*01, which differ by one amino acid in the CH1 domain. The differing residue between these two allotypes is highlighted, and surrounding residues are provided for reference. Position given in both IMGT and EU numbering.

[0617] FIG. 43B shows clinical ipilimumab (Yervoy) uses the IGHG1*08 allotype, and results in lower FcγRIIIa signaling than Ipilimumab and GIGA-564 produced by GigaGen, which use the IGHG1*01. These results suggest that allotype may impact FcγRIIIa signaling. ADCC reporter bioassays for human FcγRIIIa, V variant (G7011) were purchased from Promega Corporation. The assays were carried out following the manufacturer's instructions. Briefly, CHO target cells stably expressing human CTLA-4 with the Y201G mutation to enhance cell surface expression were suspended in RPMI 1640+4% FBS media with the indicated antibody and incubated at 37° C. for 30 minutes. Jurkat/NFAT-Luc effector cells expressing human FcγRIIIa, V variant were added to each well at an effector:target ratio of 5:1 and incubated at 37° C. for 6 hours. Luciferase activity was measured by using the included Bio-Glo Luciferase Assay Reagent with the SpectraMax i3x reader. Luciferase activity measured in relative luminescence units (RLU) were plotted against the concentration of antibody.

### 8.19. Example 16: Formulation of ABPs for Clinical Use

[0618] The study was performed to determine a formulation with optimal protein stability and ease of administration and to have a tonicity (near isotonic, 290 mOsm/kg) for simpler administration.

[0619] GIGA-564 was formulated at 20 mg/mL in a variety of buffers, then measured using differential scanning fluorimetry to look for conformation and unfolding.
[0620] Range of formulations tested: from pH 5 to pH 7.6
[0621] Buffer: The buffer was either citrate or phosphate (of varying concentrations) as was appropriate for the pH
[0622] Salt Concentration: The salt concentration ranged from 0-200 mM NaCl
[0623] Sucrose: Sucrose was tested at a range from 0-10% (weight to volume), 10% is about 290 nM

[0624] Samples run on differential scanning fluorimetry over 25-95° C. and scattering was reported as mAU. Measurement output was the ratio of fluorescence at 350 nm to 330 nm. The 350 signal doesn't change much, however as the protein unfolds the 330 signal decreases significantly (driven by tryptophan becoming more accessible).

[0625] Tonset is the temperature at which the signal starts to increase.

[0626] Tm-1-2,-3 etc. are unfolding temperatures of different domains, defined by an inflection point in the 350/330 data and local maximum in the first derivative.

[0627] For an antibody, there are not always 3 distinct Tm, but generally: Tm1=CH₂; TM2=fab; Tm3=CH₃.

[0628] Tagg=the temperature at which the scattering increases, indicating an increase in size of the particles.

[0629] The 350/330 ratio at 25° C. indicates the conformation—lower is more folded. FIG. 37 provides response plots that show the impact of pH and sucrose concentration when NaCl and buffer concentration are fixed at 100 mM and 30 mM, respectively. The results show that (i) higher Tms and Tagg are better; (ii) higher [sucrose] improves results; (iii) best pH in the middle (˜6.3); (iv) pH has little effect on Tagg.

[0630] Next, optimal conditions for the formulation were calculated. Theoretical response plots as shown in FIG. 38 were generated to determine the buffer concentration and NaCl amount expected to result in the highest Tm as shown. The results show that (i) best buffer concentration varies from 10-50 mM; and (ii) the calculated ideal [NaCl] for all parameters is high, from 80-100 mM. Next, a pareto analysis was performed to determine which variables had the most impact on the formulation. Data in FIG. 39 suggested (i) for all, sucrose concentration was the most important variable; and (ii) pH was moderately important for Tm-onset, TM-3. Additionally, FIG. 40 shows (i) high NaCl was the most important for conformation; (ii) pH had some effect, with lower pH being better; and (iii) sucrose had some effect, with higher being better.

[0631] Based on these findings, the below formulations are generated and tested.

| form. | mg/ml | pH | buffer | type | [NaCl] | [sucrose] | PS-20 | Osmo |
|---|---|---|---|---|---|---|---|---|
| 1 | 20 | 6.5 | 20 mM | histidine | — | 270 mM | 0.02% | 290 mOsm/kg |
| 2 | 20 | 6.5 | 20 mM | histidine | 50 mM | 270 mM | 0.02% | 390 mOsm/kg |
| 3 | 20 | 6.5 | 20 mM | histidine | 50 mM | 170 mM | 0.02% | 290 mOsm/kg |
| 4 | 20 | 6 | 20 mM | histidine | — | 270 mM | 0.02% | 290 mOsm/kg |
| 5 | 20 | 6 | 20 mM | histidine | 50 mM | 270 mM | 0.02% | 390 mOsm/kg |
| 6 | 20 | 6 | 20 mM | histidine | 50 mM | 170 mM | 0.02% | 290 mQsm/kg |
| 7 | 20 | 5.5 | 20 mM | citrate | — | 270 mM | 0.02% | 290 mOsm/kg |
| 8 | 20 | 5.5 | 20 mM | citrate | 50 mM | 270 mM | 0.02% | 390 mOsm/kg |
| 9 | 20 | 5.5 | 20 mM | citrate | 50 mM | 170 mM | 0.02% | 290 mOsm/kg |

TABLE 30
Phase II rationale: comparison to commercial IO mabs

| | pH | buffer | mM | sugar | mM | salt | mM | other | mM | surfactant | % |
|---|---|---|---|---|---|---|---|---|---|---|---|
| atezolizumab | 5.8 | histidine | 20 | sucrose | 120 | none | 0 | | | PS-20 | 0.040% |
| ipilimumab | 7.0 | tris | 26 | mannitol | 55 | NaCl | 100 | | | PS-80 | 0.010% |
| nivolumab | 6.0 | citrate | 20 | mannilol | 165 | NaCl | 50 | | | PS-80 | 0.020% |
| pembrolizumab | 5.5 | histidine | 2.5 | sucrose | 51 | none | 0 | | | PS-80 | 0.005% |
| durvalumab | 6.0 | histidine | 2.5 | trehalose | 28 | none | 0 | | | PS-80 | 0.002% |
| ovelumab | 5.0-5.6 | none | 0 | mannitol | 28 | none | 0 | | | PS-20 | 0.005% |
| cemiplimab | 6.0 | histidine | 10 | sucrose | 146 | none | 0 | proline | 130 | PS-80 | 0.200% |

Alternative or additional components of the formulation can include Trehalose instead of sucrose, and at appropriate pHs, histidine or succinate could be used instead of citrate/phosphate.

### 8.1. Example 17: Manufacturing of ABP, GIGA-564 and GIGA-2328

[0632] GIGA-564 can be made in CHO cells. In some variations it can be expressed transiently, for example using ExpiCHO cells, Expi293 cells, or other cell lines commonly used for transient transfection. In some variations it can be expressed from a cell line modified to stably express the heavy and light chain sequences of GIGA-564 using a cell line commonly used for stable expression, such as DG44, CHOZN GS, or others. The stable expression construct may be integrated using methods such as targeted integration, random integration, transposase-mediated integration, lentiviral transduction, or others. In some variations an enhancer element of some kind may be used to enhance transcription or translation and thus titers, for example a 2G UNic element, UCOE element, or others.

[0633] GIGA-2328 (aCTLA-4.15 with low fucosylation) is produced in cells selected due to their ability to produce proteins with reduced core fucosylation. In some variations GIGA-2328 will be produced in CHO cells expressing the bacterial protein RMD (GDP-6-deoxy-D-lyxo-4-hexulose reductase), which prevents the production of UDP-Fucose from UDP-Mannose. In some variations, fucosylated GIGA-564 can also be produced using cells expressing the bacterial protein RMD (GDP-6-deoxy-D-lyxo-4-hexulose reductase) if an external source of fucose is given to the cells. In some variations, GIGA-2328 may be produced in CHO cells lacking or having reduced expression of Fut8. In some variations, GIGA-2328 may be produced by adding the fucosylation inhibitor 2-Fluorfucose (2FF) to the media the cells are grown in. In some variations, GIGA-2328 may be produced in cells overexpressing the glycosyltransferase (GnTIII). Additionally, GIGA-2328 can be produced by other CHO cells selected or modified to have reduced fucosylation levels or by another cell line selected for its ability to produce proteins with reduced fucosylation.

[0634] To manufacture GIGA-564 cells are thawed from storage in liquid nitrogen and expanded to reach a sufficient density for inoculation of a vessel for bioproduction (including but not limited batch, fed batch or perfusion culture in a shake flask, TPP or bioreactor). In one variation, the fed batch culture is grown for approximately 14 days with addition of glucose and feeds, as appropriate. After the fed batch culture is complete the culture is harvested by methods that may include cell settling, centrifugation, and/or filtration.

[0635] GIGA-564 is purified from the harvested cell culture fluid using one or more of several chromatographic steps. The first step is Protein A or similar affinity chromatography, using a resin such as MabSelect Sure, MabSelect PrismA, CaptivA, or others. The affinity chromatography step may be followed by low pH viral inactivation, followed subsequently by cation exchange chromatography in bind and elute mode, using a resin such as POROS XS, CaptoS ImpaAct or others. Anion exchange filtration in flow-through mode is performed using a filter such as Natrix Q, SartobindQ, Mustang Anionic Exchange (Q) or others, and nanofiltration for virus removal is performed using filters such as Planova BioEX, Viresolve, Pegasus or others. Finally, GIGA-564 is subjected to ultrafiltration/diafiltration to concentrate and buffer exchange to the final formulation conditions. A similar approach for manufacturing and purifying can be used for manufacturing and purification of GIGA-2328.

### 9. INCORPORATION BY REFERENCE

[0636] All publications, patents, patent applications and other documents cited in this application are hereby incorporated by reference in their entireties for all purposes to the same extent as if each individual publication, patent, patent application or other document were individually indicated to be incorporated by reference for all purposes.

### 10. EQUIVALENTS

[0637] While various specific embodiments have been illustrated and described, the above specification is not restrictive. It will be appreciated that various changes can be made without departing from the spirit and scope of the present disclosure(s). Many variations will become apparent to those skilled in the art upon review of this specification.

### Table 19 Provides Sequences for Antibody Light Chains, Heavy Chains, CDRs, and Human CTLA4.

TABLE 19

| SEQ | | |
|---|---|---|
| ID | | Chain |
| NO | Sequence | (Antibody) |
| 1 | EIVLTQSPGTLSLSPGEGATLSCRASQSFSSNYLAWYQQKPGQAPR | L1 (A1) |
| | LLIYGASSRATGIPDRFSGSGSGTDFTLTISRLEPEDFAVYYCQQYG | “aCTLA-4.9” |
| | TSPFTFGPGTKVDIK | |
| 2 | EIVLTQSPGTLSLSPGERATLSCRASQSVSSSYLAWYQQKPGQAPR | L2 (A2) |
| | LLIYGASSRATGIPDRFSGSGSGTDFTLTISRLEPEDFAVYYCQQYG | “aCTLA-4.4” |
| | RSPFTFGPGTKVDIK | |
| 3 | EIVLTQSPGTLSLSPGERATLSCRASQSVSSSYLAWYQQKPGQAPR | L3 (A3) |
| | LLIYGASSRATGIPDRFSGSGSGTDFTLTISRLEPEDFAVYYCQQYG | “aCTLA-4.2” |
| | SSPFTFGPGTKVDIK | |
| 4 | EIVLTQSPGTLSLSPGDRATLSCRASQSGSSSYLAWYQQKPGQAPR | L4 (A4) |
| | LLIYGASSRATGIPDRFSGSGSGTDFTLTISRLEPEDFAVYYCQQYG | “aCTLA-4.29” |
| | TSPFTSGPGTKVDIK | |
| 5 | EIVLTQSPGTLSLSPGDRATLSCRASQSGSSSYLAWYQQKPGQAPR | L5 (A5) |
| | LLIYGASSRATGIPDRFSGSGSGTDFTLTISRLEPEDFAVYYCQQYG | “aCTLA-4.28” |
| | TSPFTSGPGTKVDIK | |
| 6 | DIQMTQSPSSLSASVGDRVTITCRASQSISSYLNWYQQKPGKAPKL | L6 (A6) |
| | LIYAASSLQSGVPSRFSGSGSGTDFTLTISSLQPEDFATYYCQQSYS | “aCTLA-4.26” |
| | TPFTFGPGTKVDIK | |
| 7 | EIVLTQSPGTLSLSPGERATLSCRASQSVSSSYLAWYQQKPGQAPR | L7 (A7) |
| | LLIYGASSRATGIPDRFSGSGSGTDFTLTISRLEPEDFAVYYCQQYG | “aCTLA-4.3” |
| | SSPFTFGPGTKVDIK | |
| 8 | EIVLTQSPGTLSLSPGERATLSCRASQSVSYLAWYQQKPGQAPRLL | L8 (A8) |
| | IYGASSRATGIPDRFSGSGSGTDFTLTISRLEPEDFAVYYCQQYGSS | “aCTLA-4.1” |
| | PWTFGQGTKVEIK | |
| 9 | DIQMTQSPSSLSASVGDRVTITCRASQSISSYLNWYQQKPGKAPKL | L9 (A9) |
| | LIYAASSLQSGVPSRFSGSGSGTDFTLTISSLQPEDFATYYCQQSYS | “aCTLA-4.24” |
| | TPFTFGPGTKVDIK | |
| 10 | EIVLTQSPGTLSLSPGERATLSCRASQSVSSSYLAWYQQKPGQAPR | L10 (A10) |
| | LLIYGASSRATGIPDRFSGSGSGTDFTLTISRLEPEDFAVYYCQQYG | “aCTLA-4.22” |
| | SSPFTFGPGTKVDIK | |
| 11 | DIQLTQSPSFLSASVGDRVTITCRASQGISSYLAWYQQKPGKAPKL | L11 (A11) |
| | LIYAASTLQSGVPSRFSGSGSGTEFTLTISSLQPEDFATYYCQQLNS | “aCTLA-4.31” |
| | YPPTFGQGTKVEIK | |
| 12 | EIVLTQSPGTLSLSPGERATLSCRASQSVSSSYLAWYQQKPGQAPR | L12 (A12) |
| | LLIYGASSRATGIPDRFSGSGSGTDFTLTISRLEPEDFAVYYCQQYG | “aCTLA-4.12” |
| | TSPWTFGQGTKVEIK | |
| 13 | EIVLTQSPGTLSLSPGERATLSCRASQSVSSSYLAWYQQKPGQAPR | L13 (A13) |
| | LLIYGASSRATGIPDRFSGSGSGTDFTLTISRLEPEDFAVYYCQQYG | “aCTLA-4.14” |
| | SSPFTFGPGTKVDIK | |
| 14 | EIVLTQSPGTLSLSPGERATLSCRASQSVSSSYLAWYQQKPGQAPR | L14 (A14), |
| | LLIYGASSRATGIPDRFSGSGSGTDFTLTISRLEPEDFAVYYCQQYG | “aCTLA-4.15” |
| | SSPWTSGQGTKVEIK | |
| 15 | EIVLTQSPGTLSLSPGERATLSCRASQSVSSSYLAWYQQKPGQAPR | L15 (A15) |
| | LLIYGASSRATGIPDRFSGSGSGTDFTLTISRLEPEDFAVYYCQQYG | “aCTLA-4.18” |
| | SSPFTFGPGTKVDIK | |
| 16 | DIQMTQSPSSLSASVGDRVTITCRASQGISNYLAWYQQKPGKVPK | L16 (A16) |
| | LLIYAASTLQSGVPSRFSGSGSGTDFTLTISSLQPEDVATYYCQNYN | “aCTLA-4.5” |
| | SAPWTFGQGTKVEIK | |
| 17 | DIQMTQSPSSLSASVGDRVTITCRASQAIRNDLGWYQQKPGKAPK | L17 (A17) |
| | RLIYAASSLQSGVPPRFSGSGSGTEFTLTISSLQPEDFATYYCLQHN | “aCTLA-4.17” |
| | SYPLTFGGGTKVEIK | |
| 18 | EIVLTQSPGTLSLSPGERATLSCRASQSVSYLAWYQQKPGQAPRLL | L18 (A18) |
| | IYGASSRATGIPDRFSGSGSGTDFTLTISRLEPEDFAVYYCQQYGSS | “aCTLA-4.11” |
| | PWTFGQGTKVEIK | |
| 19 | EIVLTQSPGTLSLSPGERATLSCRASQSVSSSYLAWYQQKPGQAPR | L19 (A19) |
| | LLIYGASSRATGIPDRFSGSGSGTDFTLTISRLEPEDFAVYYCQQYG | “aCTLA-4.7” |
| | SSSMYTFGQGTKLEIK | |
| 20 | EIVLTQSPGTLSLSPGERATLSCRASQSVSSSYLAWYQQKPGQAPR | L20 (A20) |
| | LLIYGASSRATGIPDRFSGSGSGTDFTLTISRLEPEDFAVYYCQQYG | “aCTLA-4.25” |
| | RSPFTFGPGTKVDIK | |
| 21 | DIVMTQSPLSLPVTPGEPASISCRSSQSLLHSNGYNYLDWYLQKPG | L21 (A21) |
| | QSPQLLIYLGSNRASGVPDRFSGSGSGTDFTLKISRVEAEDVGVYY | “aCTLA-4.10” |
| | CMQTLQTPLTFGGGTKVEIK | |
| 22 | DIQMTQSPSSLSASVGDRVTITCRASQAIRNDLGWYQQKPGKAPK | L22 (A22) |
| | RLIYAASSLQSGVPPRFSGSGSGTEFTLTISSLQPEDFATYYCLQHN | “aCTLA-4.21” |
| | SYPLTFGGGTKVEIK | |
| 23 | EIVLTQSPGTLSLSPGERATLSCRASQSVSSSYLAWYQQKPGQAPR | L23 (A23) |
| | LLIYGASSRATGIPDRFSGSGSGTDFTLTISRLEPEDFAVYYCQQYG | “aCTLA-4.23” |
| | PSPWTFGQGTKVEIK | |
| 24 | DIQMTQSPSSLSASVGDRVTITCRASQSISSYLNWYQQKPGKAPKL | L24 (A24) |
| | LIYAASSLQSGVPSRFSGSGSGTDFTLTISSLQPEDFATYYCQQSYR | “aCTLA-4.27” |
| | TPFTFGPGTKVDIK | |
| 25 | EIVMTQSPATLSLSPGERATLSCRASQSVSSSYLSWYQQKPGQAPR | L25 (A25) |
| | LLIYGASTRATGIPARFSGSGSGTDFTLTISNLQPEDFAVYYCQQGY | “aCTLA-4.32” |
| | NLPFTAGPGTKVDIK | |
| 26 | DVVMTQSPLSLPVTLGQPASISCRSSQSLVYSDGNTYLNWFQQRP | L26 (A26) |
| | GQSPRRLIYKVSNRDSGVPDRFSGSGSGTDFTLKISRVEAEDVGVY | “aCTLA-4.20” |
| | YCMQGTHWPITSGQGTRLEIK | |
| 27 | EIVLTQSPGTLSLSPGERATLSCRASQSVSSSYLAWYQQKPGQAPR | L27 (A27) |
| | LLIYGASSRATGIPDRFSGSGSGTDFTLTISRLEPEDFAVYHCQQYG | “aCTLA-4.8” |
| | RSPWTLGQGTKVEIK | |
| 28 | EIVLTQSPGTLSLSPGERATLSCRASQSVSSSYLAWYQQKPGQAPR | L28 (A28) |
| | LLIYGASSRATGIPDRFSGSGSGTDFTLTISRLEPEDFAVYYCQQYG | “aCTLA-4.19” |
| | SSPWTSGQGTKVEIK | |
| 101 | QVQLVESGGGVVQPGRSLRLSCAASGFTFSSFGMHWVRQAPGKG | H1 (A1) |
| | LEWVAVIWYDGRNKYYVDSVKGRFTISRDNSNNTLYLQMNSLRA | “aCTLA-4.9” |
| | EDTAVYYCARGEFFGEFFDYWGQGTLVTVSSA | |
| 102 | QVQLVESGGGVVQPGRSLRLSCAASGFTFSNYGMNWVRQAPGK | H2 (A2) |
| | GLEWVAVIWYDGRNKHY ADSVKGRFTISRDNSKNTLYLQMNSLR | “aCTLA-4.4” |
| | AEDTAVYYCARGGDWGPYFDYWGQGTLVTVSSA | |
| 103 | QVQLVESGGGVVQPGRSLRLSCIASGFTFSSYGMHWVRQAPGKG | H3 (A3) |
| | LEWVAVNWYDGSNKHYADSVKGRFTISRDNSKNTLYLQMNSLR | “aCTLA-4.2” |
| | AEDTAVYYCARGGVWGPYFDYWGQGTLVTVSSA | |
| 104 | QVQLVESGGGVVQPGRSLRISCAASGFTFSSYGIHWVRQAPGKGL | H4 (A4) |
| | QWVAVIWYDGRNKYYADSVKGRFTISRDNSKNTLYLQMNSLRA | “aCTLA-4.29” |
| | EDTAVYYCSRSGSFGAFDIWGQGTMVTVSSA | |
| 105 | QVQLVESGGGVVQPGRSLRLSCAASGFTFSSYGMHWVRQAPGKG | H5 (A5) |
| | LEWVAVIWYDGNNKYYADSVKGRFTISRDNSKNTLYLQMYSLRA | “aCTLA-4.28” |
| | EDTAVYYCARGGILAAGIFDYWGQGTLVTVSSA | |
| 106 | QVQLVESGGGVVQPGRSLRLSCAASGFTFSSYGMHWVRQAPGKG | H6 (A6) |
| | LEWVAVIWYDGSYKYYADSVKGRFTISRDDSKNTLYLQMSSLRA | “aCTLA-4.26” |
| | EDTAVYYCARAPHYAILTGYYEDYWGQGTLVTVSSA | |
| 107 | QVQLVESGGGVVQPGRSLRLSCAASGFTLSSFGMHWVRQAPGKG | H7 (A7) |
| | LEWVAVIWYDGSNKYYADSVKGRFIISRDNSKTALYLQMNSLRA | “aCTLA-4.3” |
| | EDTAVYYCARAHYFGAFDIWGQGTMVTVSSA | |
| 108 | QVQLVESGGGVVQPGRSLRLSCAASGFTFSRYGMHWVRQAPGKG | H8 (A8) |
| | LEWVAVIWYDGRNKYYADSVKGRFTISRDNSKNTLYLQMNSLRA | “aCTLA-4.1” |
| | EDTALYSCARAGELGPFDYWGQGTLVTVSSA | |
| 109 | QVQLVESGGGVVQPGRSLRLSCAASGFTFSSHGMHWVRQAPGKG | H9 (A9) |
| | LEWVAVIWYDGSNKHYADSVKGRFTISRDNSKNTLYLQMNSLRA | “aCTLA-4.24” |
| | EDTAVYYCARGDILTGYYGYWGQGTLVTVSSA | |
| 110 | QVQLVESGGGVVQPGRSLRLSCVASGFTLSSYGMHWVRQAPGKG | H10 (A10) |
| | LEWVAVIWYDGSNKHYADSVKGRFTISRDNSKNTLSLQMNSLRA | “aCTLA-4.22” |
| | EDTAVYYCARGGQLGPFDYWGQGTLVTVSSA | |
| 111 | QVQLVESGGGVVQPGRSLRLSCAASGFTFSSYGMHWVRQAPGKG | H11 (A11) |
| | LEWVAVIWYDVGNKYYIDSVKGRFTISRDNSKNTLYLQMNSLRA | “aCTLA-4.3]” |
| | EDTAVYYCARDYYGSGSPRHFDYWGQGTLVTVSSA | |
| 112 | QVQLVESGGGVVQPGRSLRLSCAASGFTFSSYGMHWVRQAPGKG | H12 (A12) |
| | LEWVAVIWYDGSNKYYADSVKGRFTFSRDNSKNTLYLQMNSLR | “aCTLA-4.12” |
| | AEDTAVYYCARGGLMGAFDYWGQGTLVTVSSA | |
| 113 | QVQLVESGGGVVQPGRSLRLSCAASGFTFSSYGMHWVRQAPGKG | H13 (A13) |
| | LEWVAVIWYDGRNKDYADSVKGRITISRDNSKNTLYLQMNSLRA | “aCTLA-4.14” |
| | EDTAVYYCARGGLLGPYFDYWGQGTLVTVSSA | |
| 114 | QVQLVESGGGVVQPGRSLRLSCAASGFTFSSYGMHWVRQAPGTG | H14 (A14) |
| | LEWVAVIWYEGRNKYYADPVKGRFTISRDNSKNTLYLQMNSLRD | “aCTLA-4.15” |
| | DDTAVYYCARAGDLGAFDIWGQGTMVTVSSA | |
| 115 | QVQLVESGGGVVQPGRSLRLSCAASGFTFRSYGMHWVRQAPGKG | H15 (A15) |
| | LEWVAVIWYDGSNKHYADSVKGRFTISRDNSKNTLYLQMNSLRA | “aCTLA-4.18” |
| | EDTAVYYCARNGLIGAFDIWGQGTMVTVSSA | |
| 116 | QVQLVESGGGVVQPGRSLRLSCAASGFTFSSYGIHWVRQAPGKGL | H16 (A16) |
| | EWVAVIWYDGSNKYYADSVKGRFTISRDNSKNTLYLQMNSLRAE | “aCTLA-4.5” |
| | DTAVYYCARGSLLGPFDYWGQGTLVTVSSA | |
| 117 | EVQLVESGGGLVQPGGSLRLSCAASGFTFSNYAMSWVRQAPGKG | H17 (A17) |
| | LEWVSAISGGGLSTYYADSVKGRFTISRDNSKNTLYLQMNSLRAE | “aCTLA-4.17” |
| | DTAVYYCAKDLLWLGFDYWGQGTLVTVSSA | |
| 118 | QVQLVESGGGVVQPGRSLRLSCAASGFTFSSYGMHWVRQAPGKG | H18 (A18) |
| | LEWVAVIWYDGSNKFYADSVKGRFTISSDNSKNTLYLQMNSLRA | “aCTLA-4.11” |
| | EDTAVYYCARGGHLGSFDYWGQGTLVTVSSA | |
| 119 | QVQLVQSGAEVKKPGASVKVSCKASGYTFTSYYMHWVRQAPGQ | H19 (A19) |
| | GLEWMGIINPSVGSTSYAQKFQGRVTMTRDTSTSTVYMELSSLRS | “aCTLA-4.7” |
| | EDTAVYYCAREVRVRGVIIPFFDYWDQGTLVTVSSA | |
| 120 | QVQLVQSGAEVKKPGASVKVSCKASGYTFTSYGISWVRQAPGQG | H20 (A20) |
| | LEWMGWISAYNGNTNYAQKFQGRVTMTTDTSTSTAYMELRSLRS | “aCTLA-4.25” |
| | DDTAVYYCAKVSGYFDYWGQGTLVTVSSA | |
| 121 | QVQLVESGGGVVQPGRSLRLSCAASGFTFSSYGMHWVRQAPGKG | H21 (A21) |
| | LEWVAVIWYDGNNKYYADSVKGRFTISRDNSKNTLYLHMNSLRA | “aCTLA-4.10” |
| | DDTAVYYCARMLRGAPYYYGMDVWGQGTTVTVSSA | |
| 122 | EVOLVESGGGLVQPGGSLRLSCAASGFTFSSYAMSWVRQAPGKG | H22 (A22) |
| | LEWVSGISGSGGSTYYADSVKGRFTISRDNSKNTLYLQMNSLRAE | “aCTLA-4.2]” |
| | DTAVYYCAKLGIAWYFDVWGRGTLVTVSSA | |
| 123 | QVQLVQSGAEVKKPGASVKVSCKASGYTFTSYGISWVRQAPGQG | H23 (A23) |
| | LEWMGWISAYNGNTYYAQKFQGRVTMTTDTSTSTAYVELRSLRS | “aCTLA-4.23” |
| | DDTAVYYCARVTGRDAFDIWGQGTMVTVSSA | |
| 124 | QVQLVQSGAEVKKPGASVKVSCKASGYTFTSYGISWVRQAPGQG | H24 (A24) |
| | LECMGWISAYNGNTNYAQKFQGRVTMITDTSTSTAYMELRSLRS | “aCTLA-4.27” |
| | DDTAVYYCARVGPINLDYWGQGTLVTVSSA | |
| 125 | QVQLVQSGAEVKKPGASVKVSCKASGYTFTNYGISWVRQAPGQG | H25 (A25) |
| | LEWMGWISVYNGNTNYAQKFQGRVTMTTDTSTSTAYMELRSLIS | “aCTLA-4.32” |
| | DDTAVYYCARLGKGLFDYWGQGTLVTVSSA | |
| 126 | QVQLVQSGAEVKKPGASVKVSCKASDYTFTYYGISWVRQAPGQG | H26 (A26) |
| | LEWMGWISAYNGNTNYAQKLQGRVTMTTDTSTNTAYLELRSLRS | “aCTLA-4.20” |
| | DDTAVYYCARDYYDSSGYFDYWGQGTLVTVSSA | |
| 127 | QVQLVQSGAEVKKPGASVKVSCKASGYTFTSYGISWVRQAPGQG | H27 (A27) |
| | LEWMGWISAYNGNTNYAQKLQGRVTMTTDTSTSTAYMELRSLR | “aCTLA-4.8” |
| | SDDTAVYYCGRWVRGVEYWGQGTLVTVSSA | |
| 128 | QVQLVESGGGVVQPGRSLGLSCAASGFTFSTYGMHWVRQAPGKG | H28 (A28) |
| | LEWVAVTLYDGSNKYYADSVKGRFTISRDNSKNTLYLQMNSLRA | “aCTLA-4.19” |
| | EDTAVYYCARASLTGSFDYWGQGTLVTVSSA | |
| 1001 | QSFSSNY | CDR1-L1 (A1) |
| 1002 | QSVSSSY | CDR1-L2 (A2) |
| 1003 | QSVSSSY | CDR1-L3 (A3) |
| 1004 | QSGSSSY | CDR1-L4 (A4) |
| 1005 | QSGSSSY | CDR1-L5 (A5) |
| 1006 | QSISSY | CDR1-L6 (A6) |
| 1007 | QSVSSSY | CDR1-L7 (A7) |
| 1008 | QSVSY | CDR1-L8 (A8) |
| 1009 | QSISSY | CDR1-L9 (A9) |
| 1010 | QSVSSSY | CDR1-L10 |
| | | (A10) |
| 1011 | QGISSY | CDR1-L11 |
| | | (A11) |
| 1012 | QSVSSSY | CDR1-L12 |
| | | (A12) |
| 1013 | QSVSSSY | CDR1-L13 |
| | | (A13) |
| 1014 | QSVSSSY | CDR1-L14 |
| | | (A14) |
| 1015 | QSVSSSY | CDR1-L15 |
| | | (A15) |
| 1016 | QGISNY | CDR1-L16 |
| | | (A16) |
| 1017 | QAIRND | CDR1-L17 |
| | | (A17) |
| 1018 | QSVSY | CDR1-L18 |
| | | (A18) |
| 1019 | QSVSSSY | CDR1-L19 |
| | | (A19) |
| 1020 | QSVSSSY | CDR1-L20 |
| | | (A20) |
| 1021 | QSLLHSNGYNY | CDR1-L21 |
| | | (A21) |
| 1022 | QAIRND | CDR1-L22 |
| | | (A22) |
| 1023 | QSVSSSY | CDR1-L23 |
| | | (A23) |
| 1024 | QSISSY | CDR1-L24 |
| | | (A24) |
| 1025 | QSVSSSY | CDR1-L25 |
| | | (A25) |
| 1026 | QSLVYSDGNTY | CDR1-L26 |
| | | (A26) |
| 1027 | QSVSSSY | CDR1-L27 |
| | | (A27) |
| 1028 | QSVSSSY | CDR1-L28 |
| | | (A28) |
| 2001 | GAS | CDR2-L1 (A1) |
| 2002 | GAS | CDR2-L2 (A2) |
| 2003 | GAS | CDR2-L3 (A3) |
| 2004 | GAS | CDR2-L4 (A4) |
| 2005 | GAS | CDR2-L5 (A5) |
| 2006 | AAS | CDR2-L6 (A6) |
| 2007 | GAS | CDR2-L7 (A7) |
| 2008 | GAS | CDR2-L8 (A8) |
| 2009 | AAS | CDR2-L9 (A9) |
| 2010 | GAS | CDR2-L10 |
| | | (A10) |
| 2011 | AAS | CDR2-L11 |
| | | (A11) |
| 2012 | GAS | CDR2-L12 |
| | | (A12) |
| 2013 | GAS | CDR2-L13 |
| | | (A13) |
| 2014 | GAS | CDR2-L14 |
| | | (A14) |
| 2015 | GAS | CDR2-L15 |
| | | (A15) |
| 2016 | AAS | CDR2-L16 |
| | | (A16) |
| 2017 | AAS | CDR2-L17 |
| | | (A17) |
| 2018 | GAS | CDR2-L18 |
| | | (A18) |
| 2019 | GAS | CDR2-L19 |
| | | (A19) |
| 2020 | GAS | CDR2-L20 |
| | | (A20) |
| 2021 | LGS | CDR2-L21 |
| | | (A21) |
| 2022 | AAS | CDR2-L22 |
| | | (A22) |
| 2023 | GAS | CDR2-L23 |
| | | (A23) |
| 2024 | AAS | CDR2-L24 |
| | | (A24) |
| 2025 | GAS | CDR2-L25 |
| | | (A25) |
| 2026 | KVS | CDR2-L26 |
| | | (A26) |
| 2027 | GAS | CDR2-L27 |
| | | (A27) |
| 2028 | GAS | CDR2-L28 |
| | | (A28) |
| 3001 | QQYGTSPFT | CDR3-L1 (A1) |
| 3002 | QQYGRSPFT | CDR3-L2 (A2) |
| 3003 | QQYGSSPFT | CDR3-L3 (A3) |
| 3004 | QQYGTSPFT | CDR3-L4 (A4) |
| 3005 | QQYGTSPFT | CDR3-L5 (A5) |
| 3006 | QQSYSTPFT | CDR3-L6 (A6) |
| 3007 | QQYGSSPFT | CDR3-L7 (A7) |
| 3008 | QQYGSSPWT | CDR3-L8 (A8) |
| 3009 | QQSYSTPFT | CDR3-L9 (A9) |
| 3010 | QQYGSSPFT | CDR3-L10 |
| | | (A10) |
| 3011 | QQLNSYPPT | CDR3-L11 |
| | | (A11) |
| 3012 | QQYGTSPWT | CDR3-L12 |
| | | (A12) |
| 3013 | QQYGSSPFT | CDR3-L13 |
| | | (A13) |
| 3014 | QQYGSSPWT | CDR3-L14 |
| | | (A14) |
| 3015 | QQYGSSPFT | CDR3-L15 |
| | | (A15) |
| 3016 | QNYNSAPWT | CDR3-L16 |
| | | (A16) |
| 3017 | LOHNSYPLT | CDR3-L17 |
| | | (A17) |
| 3018 | QQYGSSPWT | CDR3-L18 |
| | | (A18) |
| 3019 | QQYGSSSMYT | CDR3-L19 |
| | | (A19) |
| 3020 | QQYGRSPFT | CDR3-L20 |
| | | (A20) |
| 3021 | MQTLQTPLT | CDR3-L21 |
| | | (A21) |
| 3022 | LOHNSYPLT | CDR3-L22 |
| | | (A22) |
| 3023 | QQYGPSPWT | CDR3-L23 |
| | | (A23) |
| 3024 | QQSYRTPFT | CDR3-L24 |
| | | (A24) |
| 3025 | QQGYNLPFT | CDR3-L25 |
| | | (A25) |
| 3026 | MQGTHWPIT | CDR3-L26 |
| | | (A26) |
| 3027 | QQYGRSPWT | CDR3-L27 |
| | | (A27) |
| 3028 | QQYGSSPWT | CDR3-L28 |
| | | (A28) |
| 4001 | GFTFSSFG | CDR1-H1 |
| | | (A1) |
| 4002 | GFTFSNYG | CDR1-H2 |
| | | (A2) |
| 4003 | GFTFSSYG | CDR1-H3 |
| | | (A3) |
| 4004 | GFTFSSYG | CDR1-H4 |
| | | (A4) |
| 4005 | GFTFSSYG | CDR1-H5 |
| | | (A5) |
| 4006 | GFTFSSYG | CDR1-H6 |
| | | (A6) |
| 4007 | GFTLSSFG | CDR1-H7 |
| | | (A7) |
| 4008 | GFTFSRYG | CDR1-H8 |
| | | (A8) |
| 4009 | GFTFSSHG | CDR1-H9 |
| | | (A9) |
| 4010 | GFTLSSYG | CDR1-H10 |
| | | (A10) |
| 4011 | GFTFSSYG | CDR1-H11 |
| | | (A11) |
| 4012 | GFTFSSYG | CDR1-H12 |
| | | (A12) |
| 4013 | GFTFSSYG | CDR1-H13 |
| | | (A13) |
| 4014 | GFTFSSYG | CDR1-H14 |
| | | (A14) |
| 4015 | GFTFRSYG | CDR1-H15 |
| | | (A15) |
| 4016 | GFTFSSYG | CDR1-H16 |
| | | (A16) |
| 4017 | GFTFSNYA | CDR1-H17 |
| | | (A17) |
| 4018 | GFTFSSYG | CDR1-H18 |
| | | (A18) |
| 4019 | GYTFTSYY | CDR1-H19 |
| | | (A19) |
| 4020 | GYTFTSYG | CDR1-H20 |
| | | (A20) |
| 4021 | GFTFSSYG | CDR1-H21 |
| | | (A21) |
| 4022 | GFTFSSYA | CDR1-H22 |
| | | (A22) |
| 4023 | GYTFTSYG | CDR1-H23 |
| | | (A23) |
| 4024 | GYTFTSYG | CDR1-H24 |
| | | (A24) |
| 4025 | GYTFTNYG | CDR1-H25 |
| | | (A25) |
| 4026 | DYTFTYYG | CDR1-H26 |
| | | (A26) |
| 4027 | GYTFTSYG | CDR1-H27 |
| | | (A27) |
| 4028 | GFTFSTYG | CDR1-H28 |
| | | (A28) |
| 5001 | IWYDGRNK | CDR2-H1 |
| | | (A1) |
| 5002 | IWYDGRNK | CDR2-H2 |
| | | (A2) |
| 5003 | NWYDGSNK | CDR2-H3 |
| | | (A3) |
| 5004 | IWYDGRNK | CDR2-H4 |
| | | (A4) |
| 5005 | IWYDGNNK | CDR2-H5 |
| | | (A5) |
| 5006 | IWYDGSYK | CDR2-H6 |
| | | (A6) |
| 5007 | IWYDGSNK | CDR2-H7 |
| | | (A7) |
| 5008 | IWYDGRNK | CDR2-H8 |
| | | (A8) |
| 5009 | IWYDGSNK | CDR2-H9 |
| | | (A9) |
| 5010 | IWYDGSNK | CDR2-H10 |
| | | (A10) |
| 5011 | IWYDVGNK | CDR2-H11 |
| | | (A11) |
| 5012 | IWYDGSNK | CDR2-H12 |
| | | (A12) |
| 5013 | IWYDGRNK | CDR2-H13 |
| | | (A13 |
| 5014 | IWYEGRNK | CDR2-H14 |
| | | (A14) |
| 5015 | IWYDGSNK | CDR2-H15 |
| | | (A15) |
| 5016 | IWYDGSNK | CDR2-H16 |
| | | (A16) |
| 5017 | ISGGGLST | CDR2-H17 |
| | | (A17) |
| 5018 | IWYDGSNK | CDR2-H18 |
| | | (A18) |
| 5019 | INPSVGST | CDR2-H19 |
| | | (A19) |
| 5020 | ISAYNGNT | CDR2-H20 |
| | | (A20) |
| 5021 | IWYDGNNK | CDR2-H21 |
| | | (A21) |
| 5022 | ISGSGGST | CDR2-H22 |
| | | (A22) |
| 5023 | ISAYNGNT | CDR2-H23 |
| | | (A23) |
| 5024 | ISAYNGNT | CDR2-H24 |
| | | (A24) |
| 5025 | ISVYNGNT | CDR2-H25 |
| | | (A25) |
| 5026 | ISAYNGNT | CDR2-H26 |
| | | (A26) |
| 5027 | ISAYNGNT | CDR2-H27 |
| | | (A27) |
| 5028 | TLYDGSNK | CDR2-H28 |
| | | (A28) |
| 6001 | ARGEFFGEFFDY | CDR3-H1 |
| | | (A1) |
| 6002 | ARGGDWGPYFDY | CDR3-H2 |
| | | (A2) |
| 6003 | ARGGVWGPYFDY | CDR3-H3 |
| | | (A3) |
| 6004 | SRSGSFGAFDI | CDR3-H4 |
| | | (A4) |
| 6005 | ARGGILAAGIFDY | CDR3-H5 |
| | | (A5) |
| 6006 | ARAPHYAILTGYYEDY | CDR3-H6 |
| | | (A6) |
| 6007 | ARAHYFGAFDI | CDR3-H7 |
| | | (A7) |
| 6008 | ARAGELGPFDY | CDR3-H8 |
| | | (A8) |
| 6009 | ARGDILTGYYGY | CDR3-H9 |
| | | (A9) |
| 6010 | ARGGQLGPFDY | CDR3-H10 |
| | | (A10) |
| 6011 | ARDYYGSGSPRHFDY | CDR3-H11 |
| | | (A11) |
| 6012 | ARGGLMGAFDY | CDR3-H12 |
| | | (A12) |
| 6013 | ARGGLLGPYFDY | CDR3-H13 |
| | | (A13) |
| 6014 | ARAGDLGAFDI | CDR3-H14 |
| | | (A14) |
| 6015 | ARNGLIGAFDI | CDR3-H15 |
| | | (A15) |
| 6016 | ARGSLLGPFDY | CDR3-H16 |
| | | (A16) |
| 6017 | AKDLLWLGFDY | CDR3-H17 |
| | | (A17) |
| 6018 | ARGGHLGSFDY | CDR3-H18 |
| | | (A18) |
| 6019 | AREVRVRGVIIPFFDY | CDR3-H19 |
| | | (A19) |
| 6020 | AKVSGYFDY | CDR3-H20 |
| | | (A20) |
| 6021 | ARMLRGAPYYYGMDV | CDR3-H21 |
| | | (A21) |
| 6022 | AKLGIAWYFDV | CDR3-H22 |
| | | (A22) |
| 6023 | ARVTGRDAFDI | CDR3-H23 |
| | | (A23) |
| 6024 | ARVGPINLDY | CDR3-H24 |
| | | (A24) |
| 6025 | ARLGKGLFDY | CDR3-H25 |
| | | (A25) |
| 6026 | ARDYYDSSGYFDY | CDR3-H26 |
| | | (A26) |
| 6027 | GRWVRGVEY | CDR3-H27 |
| | | (A27) |
| 6028 | ARASLTGSFDY | CDR3-H28 |
| | | (A28) |
| 7001 | MACLGFQRHKAQLNLAARTWPCTLLFFLLFIPVFCKAMHVAQPA | Human |
| | VVLASSRGIASFVCEYASPGKATEVRVTVLRQADSQVTEVCAATY | CTLA4 |
| | MMGNELTFLDDSICTGTSSGNQVNLTIQGLRAMDTGLYICKVELM | |
| | YPPPYYLGIGNGTQIYVIDPEPCPDSDFLLWILAAVSSGLFFYSFLLT | |
| | AVSLSKMLKKRSPLTTGVYVKMPPTEPECEKQFQPYFIPIN | |

### Table 20 Provides the Sequence Identifiers for the Light Chain, Heavy Chain, and CDRs of the Indicated Clones

TABLE 20

| Antibody | SEQ ID NO | | | | | | | |
|---|---|---|---|---|---|---|---|---|
| Clone | Light | Heavy | CDR1 | CDR2 | CDR3 | CDR1 | CDR2 | CDR3 |
| Number | Chain | Chain | (Light) | (Light) | (Light) | (Heavy) | (Heavy) | (Heavy) |
| 1 | 8000 | 8496 | 8992 | 9488 | 9984 | 10480 | 10976 | 11472 |
| 2 | 8001 | 8497 | 8993 | 9489 | 9985 | 10481 | 10977 | 11473 |
| 3 | 8002 | 8498 | 8994 | 9490 | 9986 | 10482 | 10978 | 11474 |
| 4 | 8003 | 8499 | 8995 | 9491 | 9987 | 10483 | 10979 | 11475 |
| 5 | 8004 | 8500 | 8996 | 9492 | 9988 | 10484 | 10980 | 11476 |
| 6 | 8005 | 8501 | 8997 | 9493 | 9989 | 10485 | 10981 | 11477 |
| 7 | 8006 | 8502 | 8998 | 9494 | 9990 | 10486 | 10982 | 11478 |
| 8 | 8007 | 8503 | 8999 | 9495 | 9991 | 10487 | 10983 | 11479 |
| 9 | 8008 | 8504 | 9000 | 9496 | 9992 | 10488 | 10984 | 11480 |
| 10 | 8009 | 8505 | 9001 | 9497 | 9993 | 10489 | 10985 | 11481 |
| 11 | 8010 | 8506 | 9002 | 9498 | 9994 | 10490 | 10986 | 11482 |
| 12 | 8011 | 8507 | 9003 | 9499 | 9995 | 10491 | 10987 | 11483 |
| 13 | 8012 | 8508 | 9004 | 9500 | 9996 | 10492 | 10988 | 11484 |
| 14 | 8013 | 8509 | 9005 | 9501 | 9997 | 10493 | 10989 | 11485 |
| 15 | 8014 | 8510 | 9006 | 9502 | 9998 | 10494 | 10990 | 11486 |
| 16 | 8015 | 8511 | 9007 | 9503 | 9999 | 10495 | 10991 | 11487 |
| 17 | 8016 | 8512 | 9008 | 9504 | 10000 | 10496 | 10992 | 11488 |
| 18 | 8017 | 8513 | 9009 | 9505 | 10001 | 10497 | 10993 | 11489 |
| 19 | 8018 | 8514 | 9010 | 9506 | 10002 | 10498 | 10994 | 11490 |
| 20 | 8019 | 8515 | 9011 | 9507 | 10003 | 10499 | 10995 | 11491 |
| 21 | 8020 | 8516 | 9012 | 9508 | 10004 | 10500 | 10996 | 11492 |
| 22 | 8021 | 8517 | 9013 | 9509 | 10005 | 10501 | 10997 | 11493 |
| 23 | 8022 | 8518 | 9014 | 9510 | 10006 | 10502 | 10998 | 11494 |
| 24 | 8023 | 8519 | 9015 | 9511 | 10007 | 10503 | 10999 | 11495 |
| 25 | 8024 | 8520 | 9016 | 9512 | 10008 | 10504 | 11000 | 11496 |
| 26 | 8025 | 8521 | 9017 | 9513 | 10009 | 10505 | 11001 | 11497 |
| 27 | 8026 | 8522 | 9018 | 9514 | 10010 | 10506 | 11002 | 11498 |
| 28 | 8027 | 8523 | 9019 | 9515 | 10011 | 10507 | 11003 | 11499 |
| 29 | 8028 | 8524 | 9020 | 9516 | 10012 | 10508 | 11004 | 11500 |
| 30 | 8029 | 8525 | 9021 | 9517 | 10013 | 10509 | 11005 | 11501 |
| 31 | 8030 | 8526 | 9022 | 9518 | 10014 | 10510 | 11006 | 11502 |
| 32 | 8031 | 8527 | 9023 | 9519 | 10015 | 10511 | 11007 | 11503 |
| 33 | 8032 | 8528 | 9024 | 9520 | 10016 | 10512 | 11008 | 11504 |
| 34 | 8033 | 8529 | 9025 | 9521 | 10017 | 10513 | 11009 | 11505 |
| 35 | 8034 | 8530 | 9026 | 9522 | 10018 | 10514 | 11010 | 11506 |
| 36 | 8035 | 8531 | 9027 | 9523 | 10019 | 10515 | 11011 | 11507 |
| 37 | 8036 | 8532 | 9028 | 9524 | 10020 | 10516 | 11012 | 11508 |
| 38 | 8037 | 8533 | 9029 | 9525 | 10021 | 10517 | 11013 | 11509 |
| 39 | 8038 | 8534 | 9030 | 9526 | 10022 | 10518 | 11014 | 11510 |
| 40 | 8039 | 8535 | 9031 | 9527 | 10023 | 10519 | 11015 | 11511 |
| 41 | 8040 | 8536 | 9032 | 9528 | 10024 | 10520 | 11016 | 11512 |
| 42 | 8041 | 8537 | 9033 | 9529 | 10025 | 10521 | 11017 | 11513 |
| 43 | 8042 | 8538 | 9034 | 9530 | 10026 | 10522 | 11018 | 11514 |
| 44 | 8043 | 8539 | 9035 | 9531 | 10027 | 10523 | 11019 | 11515 |
| 45 | 8044 | 8540 | 9036 | 9532 | 10028 | 10524 | 11020 | 11516 |
| 46 | 8045 | 8541 | 9037 | 9533 | 10029 | 10525 | 11021 | 11517 |
| 47 | 8046 | 8542 | 9038 | 9534 | 10030 | 10526 | 11022 | 11518 |
| 48 | 8047 | 8543 | 9039 | 9535 | 10031 | 10527 | 11023 | 11519 |
| 49 | 8048 | 8544 | 9040 | 9536 | 10032 | 10528 | 11024 | 11520 |
| 50 | 8049 | 8545 | 9041 | 9537 | 10033 | 10529 | 11025 | 11521 |
| 51 | 8050 | 8546 | 9042 | 9538 | 10034 | 10530 | 11026 | 11522 |
| 52 | 8051 | 8547 | 9043 | 9539 | 10035 | 10531 | 11027 | 11523 |
| 53 | 8052 | 8548 | 9044 | 9540 | 10036 | 10532 | 11028 | 11524 |
| 54 | 8053 | 8549 | 9045 | 9541 | 10037 | 10533 | 11029 | 11525 |
| 55 | 8054 | 8550 | 9046 | 9542 | 10038 | 10534 | 11030 | 11526 |
| 56 | 8055 | 8551 | 9047 | 9543 | 10039 | 10535 | 11031 | 11527 |
| 57 | 8056 | 8552 | 9048 | 9544 | 10040 | 10536 | 11032 | 11528 |
| 58 | 8057 | 8553 | 9049 | 9545 | 10041 | 10537 | 11033 | 11529 |
| 59 | 8058 | 8554 | 9050 | 9546 | 10042 | 10538 | 11034 | 11530 |
| 60 | 8059 | 8555 | 9051 | 9547 | 10043 | 10539 | 11035 | 11531 |
| 61 | 8060 | 8556 | 9052 | 9548 | 10044 | 10540 | 11036 | 11532 |
| 62 | 8061 | 8557 | 9053 | 9549 | 10045 | 10541 | 11037 | 11533 |
| 63 | 8062 | 8558 | 9054 | 9550 | 10046 | 10542 | 11038 | 11534 |
| 64 | 8063 | 8559 | 9055 | 9551 | 10047 | 10543 | 11039 | 11535 |
| 65 | 8064 | 8560 | 9056 | 9552 | 10048 | 10544 | 11040 | 11536 |
| 66 | 8065 | 8561 | 9057 | 9553 | 10049 | 10545 | 11041 | 11537 |
| 67 | 8066 | 8562 | 9058 | 9554 | 10050 | 10546 | 11042 | 11538 |
| 68 | 8067 | 8563 | 9059 | 9555 | 10051 | 10547 | 11043 | 11539 |
| 69 | 8068 | 8564 | 9060 | 9556 | 10052 | 10548 | 11044 | 11540 |
| 70 | 8069 | 8565 | 9061 | 9557 | 10053 | 10549 | 11045 | 11541 |
| 71 | 8070 | 8566 | 9062 | 9558 | 10054 | 10550 | 11046 | 11542 |
| 72 | 8071 | 8567 | 9063 | 9559 | 10055 | 10551 | 11047 | 11543 |
| 73 | 8072 | 8568 | 9064 | 9560 | 10056 | 10552 | 11048 | 11544 |
| 74 | 8073 | 8569 | 9065 | 9561 | 10057 | 10553 | 11049 | 11545 |
| 75 | 8074 | 8570 | 9066 | 9562 | 10058 | 10554 | 11050 | 11546 |
| 76 | 8075 | 8571 | 9067 | 9563 | 10059 | 10555 | 11051 | 11547 |
| 77 | 8076 | 8572 | 9068 | 9564 | 10060 | 10556 | 11052 | 11548 |
| 78 | 8077 | 8573 | 9069 | 9565 | 10061 | 10557 | 11053 | 11549 |
| 79 | 8078 | 8574 | 9070 | 9566 | 10062 | 10558 | 11054 | 11550 |
| 80 | 8079 | 8575 | 9071 | 9567 | 10063 | 10559 | 11055 | 11551 |
| 81 | 8080 | 8576 | 9072 | 9568 | 10064 | 10560 | 11056 | 11552 |
| 82 | 8081 | 8577 | 9073 | 9569 | 10065 | 10561 | 11057 | 11553 |
| 83 | 8082 | 8578 | 9074 | 9570 | 10066 | 10562 | 11058 | 11554 |
| 84 | 8083 | 8579 | 9075 | 9571 | 10067 | 10563 | 11059 | 11555 |
| 85 | 8084 | 8580 | 9076 | 9572 | 10068 | 10564 | 11060 | 11556 |
| 86 | 8085 | 8581 | 9077 | 9573 | 10069 | 10565 | 11061 | 11557 |
| 87 | 8086 | 8582 | 9078 | 9574 | 10070 | 10566 | 11062 | 11558 |
| 88 | 8087 | 8583 | 9079 | 9575 | 10071 | 10567 | 11063 | 11559 |
| 89 | 8088 | 8584 | 9080 | 9576 | 10072 | 10568 | 11064 | 11560 |
| 90 | 8089 | 8585 | 9081 | 9577 | 10073 | 10569 | 11065 | 11561 |
| 91 | 8090 | 8586 | 9082 | 9578 | 10074 | 10570 | 11066 | 11562 |
| 92 | 8091 | 8587 | 9083 | 9579 | 10075 | 10571 | 11067 | 11563 |
| 93 | 8092 | 8588 | 9084 | 9580 | 10076 | 10572 | 11068 | 11564 |
| 94 | 8093 | 8589 | 9085 | 9581 | 10077 | 10573 | 11069 | 11565 |
| 95 | 8094 | 8590 | 9086 | 9582 | 10078 | 10574 | 11070 | 11566 |
| 96 | 8095 | 8591 | 9087 | 9583 | 10079 | 10575 | 11071 | 11567 |
| 97 | 8096 | 8592 | 9088 | 9584 | 10080 | 10576 | 11072 | 11568 |
| 98 | 8097 | 8593 | 9089 | 9585 | 10081 | 10577 | 11073 | 11569 |
| 99 | 8098 | 8594 | 9090 | 9586 | 10082 | 10578 | 11074 | 11570 |
| 100 | 8099 | 8595 | 9091 | 9587 | 10083 | 10579 | 11075 | 11571 |
| 101 | 8100 | 8596 | 9092 | 9588 | 10084 | 10580 | 11076 | 11572 |
| 102 | 8101 | 8597 | 9093 | 9589 | 10085 | 10581 | 11077 | 11573 |
| 103 | 8102 | 8598 | 9094 | 9590 | 10086 | 10582 | 11078 | 11574 |
| 104 | 8103 | 8599 | 9095 | 9591 | 10087 | 10583 | 11079 | 11575 |
| 105 | 8104 | 8600 | 9096 | 9592 | 10088 | 10584 | 11080 | 11576 |
| 106 | 8105 | 8601 | 9097 | 9593 | 10089 | 10585 | 11081 | 11577 |
| 107 | 8106 | 8602 | 9098 | 9594 | 10090 | 10586 | 11082 | 11578 |
| 108 | 8107 | 8603 | 9099 | 9595 | 10091 | 10587 | 11083 | 11579 |
| 109 | 8108 | 8604 | 9100 | 9596 | 10092 | 10588 | 11084 | 11580 |
| 110 | 8109 | 8605 | 9101 | 9597 | 10093 | 10589 | 11085 | 11581 |
| 111 | 8110 | 8606 | 9102 | 9598 | 10094 | 10590 | 11086 | 11582 |
| 112 | 8111 | 8607 | 9103 | 9599 | 10095 | 10591 | 11087 | 11583 |
| 113 | 8112 | 8608 | 9104 | 9600 | 10096 | 10592 | 11088 | 11584 |
| 114 | 8113 | 8609 | 9105 | 9601 | 10097 | 10593 | 11089 | 11585 |
| 115 | 8114 | 8610 | 9106 | 9602 | 10098 | 10594 | 11090 | 11586 |
| 116 | 8115 | 8611 | 9107 | 9603 | 10099 | 10595 | 11091 | 11587 |
| 117 | 8116 | 8612 | 9108 | 9604 | 10100 | 10596 | 11092 | 11588 |
| 118 | 8117 | 8613 | 9109 | 9605 | 10101 | 10597 | 11093 | 11589 |
| 119 | 8118 | 8614 | 9110 | 9606 | 10102 | 10598 | 11094 | 11590 |
| 120 | 8119 | 8615 | 9111 | 9607 | 10103 | 10599 | 11095 | 11591 |
| 121 | 8120 | 8616 | 9112 | 9608 | 10104 | 10600 | 11096 | 11592 |
| 122 | 8121 | 8617 | 9113 | 9609 | 10105 | 10601 | 11097 | 11593 |
| 123 | 8122 | 8618 | 9114 | 9610 | 10106 | 10602 | 11098 | 11594 |
| 124 | 8123 | 8619 | 9115 | 9611 | 10107 | 10603 | 11099 | 11595 |
| 125 | 8124 | 8620 | 9116 | 9612 | 10108 | 10604 | 11100 | 11596 |
| 126 | 8125 | 8621 | 9117 | 9613 | 10109 | 10605 | 11101 | 11597 |
| 127 | 8126 | 8622 | 9118 | 9614 | 10110 | 10606 | 11102 | 11598 |
| 128 | 8127 | 8623 | 9119 | 9615 | 10111 | 10607 | 11103 | 11599 |
| 129 | 8128 | 8624 | 9120 | 9616 | 10112 | 10608 | 11104 | 11600 |
| 130 | 8129 | 8625 | 9121 | 9617 | 10113 | 10609 | 11105 | 11601 |
| 131 | 8130 | 8626 | 9122 | 9618 | 10114 | 10610 | 11106 | 11602 |
| 132 | 8131 | 8627 | 9123 | 9619 | 10115 | 10611 | 11107 | 11603 |
| 133 | 8132 | 8628 | 9124 | 9620 | 10116 | 10612 | 11108 | 11604 |
| 134 | 8133 | 8629 | 9125 | 9621 | 10117 | 10613 | 11109 | 11605 |
| 135 | 8134 | 8630 | 9126 | 9622 | 10118 | 10614 | 11110 | 11606 |
| 136 | 8135 | 8631 | 9127 | 9623 | 10119 | 10615 | 11111 | 11607 |
| 137 | 8136 | 8632 | 9128 | 9624 | 10120 | 10616 | 11112 | 11608 |
| 138 | 8137 | 8633 | 9129 | 9625 | 10121 | 10617 | 11113 | 11609 |
| 139 | 8138 | 8634 | 9130 | 9626 | 10122 | 10618 | 11114 | 11610 |
| 140 | 8139 | 8635 | 9131 | 9627 | 10123 | 10619 | 11115 | 11611 |
| 141 | 8140 | 8636 | 9132 | 9628 | 10124 | 10620 | 11116 | 11612 |
| 142 | 8141 | 8637 | 9133 | 9629 | 10125 | 10621 | 11117 | 11613 |
| 143 | 8142 | 8638 | 9134 | 9630 | 10126 | 10622 | 11118 | 11614 |
| 144 | 8143 | 8639 | 9135 | 9631 | 10127 | 10623 | 11119 | 11615 |
| 145 | 8144 | 8640 | 9136 | 9632 | 10128 | 10624 | 11120 | 11616 |
| 146 | 8145 | 8641 | 9137 | 9633 | 10129 | 10625 | 11121 | 11617 |
| 147 | 8146 | 8642 | 9138 | 9634 | 10130 | 10626 | 11122 | 11618 |
| 148 | 8147 | 8643 | 9139 | 9635 | 10131 | 10627 | 11123 | 11619 |
| 149 | 8148 | 8644 | 9140 | 9636 | 10132 | 10628 | 11124 | 11620 |
| 150 | 8149 | 8645 | 9141 | 9637 | 10133 | 10629 | 11125 | 11621 |
| 151 | 8150 | 8646 | 9142 | 9638 | 10134 | 10630 | 11126 | 11622 |
| 152 | 8151 | 8647 | 9143 | 9639 | 10135 | 10631 | 11127 | 11623 |
| 153 | 8152 | 8648 | 9144 | 9640 | 10136 | 10632 | 11128 | 11624 |
| 154 | 8153 | 8649 | 9145 | 9641 | 10137 | 10633 | 11129 | 11625 |
| 155 | 8154 | 8650 | 9146 | 9642 | 10138 | 10634 | 11130 | 11626 |
| 156 | 8155 | 8651 | 9147 | 9643 | 10139 | 10635 | 11131 | 11627 |
| 157 | 8156 | 8652 | 9148 | 9644 | 10140 | 10636 | 11132 | 11628 |
| 158 | 8157 | 8653 | 9149 | 9645 | 10141 | 10637 | 11133 | 11629 |
| 159 | 8158 | 8654 | 9150 | 9646 | 10142 | 10638 | 11134 | 11630 |
| 160 | 8159 | 8655 | 9151 | 9647 | 10143 | 10639 | 11135 | 11631 |
| 161 | 8160 | 8656 | 9152 | 9648 | 10144 | 10640 | 11136 | 11632 |
| 162 | 8161 | 8657 | 9153 | 9649 | 10145 | 10641 | 11137 | 11633 |
| 163 | 8162 | 8658 | 9154 | 9650 | 10146 | 10642 | 11138 | 11634 |
| 164 | 8163 | 8659 | 9155 | 9651 | 10147 | 10643 | 11139 | 11635 |
| 165 | 8164 | 8660 | 9156 | 9652 | 10148 | 10644 | 11140 | 11636 |
| 166 | 8165 | 8661 | 9157 | 9653 | 10149 | 10645 | 11141 | 11637 |
| 167 | 8166 | 8662 | 9158 | 9654 | 10150 | 10646 | 11142 | 11638 |
| 168 | 8167 | 8663 | 9159 | 9655 | 10151 | 10647 | 11143 | 11639 |
| 169 | 8168 | 8664 | 9160 | 9656 | 10152 | 10648 | 11144 | 11640 |
| 170 | 8169 | 8665 | 9161 | 9657 | 10153 | 10649 | 11145 | 11641 |
| 171 | 8170 | 8666 | 9162 | 9658 | 10154 | 10650 | 11146 | 11642 |
| 172 | 8171 | 8667 | 9163 | 9659 | 10155 | 10651 | 11147 | 11643 |
| 173 | 8172 | 8668 | 9164 | 9660 | 10156 | 10652 | 11148 | 11644 |
| 174 | 8173 | 8669 | 9165 | 9661 | 10157 | 10653 | 11149 | 11645 |
| 175 | 8174 | 8670 | 9166 | 9662 | 10158 | 10654 | 11150 | 11646 |
| 176 | 8175 | 8671 | 9167 | 9663 | 10159 | 10655 | 11151 | 11647 |
| 177 | 8176 | 8672 | 9168 | 9664 | 10160 | 10656 | 11152 | 11648 |
| 178 | 8177 | 8673 | 9169 | 9665 | 10161 | 10657 | 11153 | 11649 |
| 179 | 8178 | 8674 | 9170 | 9666 | 10162 | 10658 | 11154 | 11650 |
| 180 | 8179 | 8675 | 9171 | 9667 | 10163 | 10659 | 11155 | 11651 |
| 181 | 8180 | 8676 | 9172 | 9668 | 10164 | 10660 | 11156 | 11652 |
| 182 | 8181 | 8677 | 9173 | 9669 | 10165 | 10661 | 11157 | 11653 |
| 183 | 8182 | 8678 | 9174 | 9670 | 10166 | 10662 | 11158 | 11654 |
| 184 | 8183 | 8679 | 9175 | 9671 | 10167 | 10663 | 11159 | 11655 |
| 185 | 8184 | 8680 | 9176 | 9672 | 10168 | 10664 | 11160 | 11656 |
| 186 | 8185 | 8681 | 9177 | 9673 | 10169 | 10665 | 11161 | 11657 |
| 187 | 8186 | 8682 | 9178 | 9674 | 10170 | 10666 | 11162 | 11658 |
| 188 | 8187 | 8683 | 9179 | 9675 | 10171 | 10667 | 11163 | 11659 |
| 189 | 8188 | 8684 | 9180 | 9676 | 10172 | 10668 | 11164 | 11660 |
| 190 | 8189 | 8685 | 9181 | 9677 | 10173 | 10669 | 11165 | 11661 |
| 191 | 8190 | 8686 | 9182 | 9678 | 10174 | 10670 | 11166 | 11662 |
| 192 | 8191 | 8687 | 9183 | 9679 | 10175 | 10671 | 11167 | 11663 |
| 193 | 8192 | 8688 | 9184 | 9680 | 10176 | 10672 | 11168 | 11664 |
| 194 | 8193 | 8689 | 9185 | 9681 | 10177 | 10673 | 11169 | 11665 |
| 195 | 8194 | 8690 | 9186 | 9682 | 10178 | 10674 | 11170 | 11666 |
| 196 | 8195 | 8691 | 9187 | 9683 | 10179 | 10675 | 11171 | 11667 |
| 197 | 8196 | 8692 | 9188 | 9684 | 10180 | 10676 | 11172 | 11668 |
| 198 | 8197 | 8693 | 9189 | 9685 | 10181 | 10677 | 11173 | 11669 |
| 199 | 8198 | 8694 | 9190 | 9686 | 10182 | 10678 | 11174 | 11670 |
| 200 | 8199 | 8695 | 9191 | 9687 | 10183 | 10679 | 11175 | 11671 |
| 201 | 8200 | 8696 | 9192 | 9688 | 10184 | 10680 | 11176 | 11672 |
| 202 | 8201 | 8697 | 9193 | 9689 | 10185 | 10681 | 11177 | 11673 |
| 203 | 8202 | 8698 | 9194 | 9690 | 10186 | 10682 | 11178 | 11674 |
| 204 | 8203 | 8699 | 9195 | 9691 | 10187 | 10683 | 11179 | 11675 |
| 205 | 8204 | 8700 | 9196 | 9692 | 10188 | 10684 | 11180 | 11676 |
| 206 | 8205 | 8701 | 9197 | 9693 | 10189 | 10685 | 11181 | 11677 |
| 207 | 8206 | 8702 | 9198 | 9694 | 10190 | 10686 | 11182 | 11678 |
| 208 | 8207 | 8703 | 9199 | 9695 | 10191 | 10687 | 11183 | 11679 |
| 209 | 8208 | 8704 | 9200 | 9696 | 10192 | 10688 | 11184 | 11680 |
| 210 | 8209 | 8705 | 9201 | 9697 | 10193 | 10689 | 11185 | 11681 |
| 211 | 8210 | 8706 | 9202 | 9698 | 10194 | 10690 | 11186 | 11682 |
| 212 | 8211 | 8707 | 9203 | 9699 | 10195 | 10691 | 11187 | 11683 |
| 213 | 8212 | 8708 | 9204 | 9700 | 10196 | 10692 | 11188 | 11684 |
| 214 | 8213 | 8709 | 9205 | 9701 | 10197 | 10693 | 11189 | 11685 |
| 215 | 8214 | 8710 | 9206 | 9702 | 10198 | 10694 | 11190 | 11686 |
| 216 | 8215 | 8711 | 9207 | 9703 | 10199 | 10695 | 11191 | 11687 |
| 217 | 8216 | 8712 | 9208 | 9704 | 10200 | 10696 | 11192 | 11688 |
| 218 | 8217 | 8713 | 9209 | 9705 | 10201 | 10697 | 11193 | 11689 |
| 219 | 8218 | 8714 | 9210 | 9706 | 10202 | 10698 | 11194 | 11690 |
| 220 | 8219 | 8715 | 9211 | 9707 | 10203 | 10699 | 11195 | 11691 |
| 221 | 8220 | 8716 | 9212 | 9708 | 10204 | 10700 | 11196 | 11692 |
| 222 | 8221 | 8717 | 9213 | 9709 | 10205 | 10701 | 11197 | 11693 |
| 223 | 8222 | 8718 | 9214 | 9710 | 10206 | 10702 | 11198 | 11694 |
| 224 | 8223 | 8719 | 9215 | 9711 | 10207 | 10703 | 11199 | 11695 |
| 225 | 8224 | 8720 | 9216 | 9712 | 10208 | 10704 | 11200 | 11696 |
| 226 | 8225 | 8721 | 9217 | 9713 | 10209 | 10705 | 11201 | 11697 |
| 227 | 8226 | 8722 | 9218 | 9714 | 10210 | 10706 | 11202 | 11698 |
| 228 | 8227 | 8723 | 9219 | 9715 | 10211 | 10707 | 11203 | 11699 |
| 229 | 8228 | 8724 | 9220 | 9716 | 10212 | 10708 | 11204 | 11700 |
| 230 | 8229 | 8725 | 9221 | 9717 | 10213 | 10709 | 11205 | 11701 |
| 231 | 8230 | 8726 | 9222 | 9718 | 10214 | 10710 | 11206 | 11702 |
| 232 | 8231 | 8727 | 9223 | 9719 | 10215 | 10711 | 11207 | 11703 |
| 233 | 8232 | 8728 | 9224 | 9720 | 10216 | 10712 | 11208 | 11704 |
| 234 | 8233 | 8729 | 9225 | 9721 | 10217 | 10713 | 11209 | 11705 |
| 235 | 8234 | 8730 | 9226 | 9722 | 10218 | 10714 | 11210 | 11706 |
| 236 | 8235 | 8731 | 9227 | 9723 | 10219 | 10715 | 11211 | 11707 |
| 237 | 8236 | 8732 | 9228 | 9724 | 10220 | 10716 | 11212 | 11708 |
| 238 | 8237 | 8733 | 9229 | 9725 | 10221 | 10717 | 11213 | 11709 |
| 239 | 8238 | 8734 | 9230 | 9726 | 10222 | 10718 | 11214 | 11710 |
| 240 | 8239 | 8735 | 9231 | 9727 | 10223 | 10719 | 11215 | 11711 |
| 241 | 8240 | 8736 | 9232 | 9728 | 10224 | 10720 | 11216 | 11712 |
| 242 | 8241 | 8737 | 9233 | 9729 | 10225 | 10721 | 11217 | 11713 |
| 243 | 8242 | 8738 | 9234 | 9730 | 10226 | 10722 | 11218 | 11714 |
| 244 | 8243 | 8739 | 9235 | 9731 | 10227 | 10723 | 11219 | 11715 |
| 245 | 8244 | 8740 | 9236 | 9732 | 10228 | 10724 | 11220 | 11716 |
| 246 | 8245 | 8741 | 9237 | 9733 | 10229 | 10725 | 11221 | 11717 |
| 247 | 8246 | 8742 | 9238 | 9734 | 10230 | 10726 | 11222 | 11718 |
| 248 | 8247 | 8743 | 9239 | 9735 | 10231 | 10727 | 11223 | 11719 |
| 249 | 8248 | 8744 | 9240 | 9736 | 10232 | 10728 | 11224 | 11720 |
| 250 | 8249 | 8745 | 9241 | 9737 | 10233 | 10729 | 11225 | 11721 |
| 251 | 8250 | 8746 | 9242 | 9738 | 10234 | 10730 | 11226 | 11722 |
| 252 | 8251 | 8747 | 9243 | 9739 | 10235 | 10731 | 11227 | 11723 |
| 253 | 8252 | 8748 | 9244 | 9740 | 10236 | 10732 | 11228 | 11724 |
| 254 | 8253 | 8749 | 9245 | 9741 | 10237 | 10733 | 11229 | 11725 |
| 255 | 8254 | 8750 | 9246 | 9742 | 10238 | 10734 | 11230 | 11726 |
| 256 | 8255 | 8751 | 9247 | 9743 | 10239 | 10735 | 11231 | 11727 |
| 257 | 8256 | 8752 | 9248 | 9744 | 10240 | 10736 | 11232 | 11728 |
| 258 | 8257 | 8753 | 9249 | 9745 | 10241 | 10737 | 11233 | 11729 |
| 259 | 8258 | 8754 | 9250 | 9746 | 10242 | 10738 | 11234 | 11730 |
| 260 | 8259 | 8755 | 9251 | 9747 | 10243 | 10739 | 11235 | 11731 |
| 261 | 8260 | 8756 | 9252 | 9748 | 10244 | 10740 | 11236 | 11732 |
| 262 | 8261 | 8757 | 9253 | 9749 | 10245 | 10741 | 11237 | 11733 |
| 263 | 8262 | 8758 | 9254 | 9750 | 10246 | 10742 | 11238 | 11734 |
| 264 | 8263 | 8759 | 9255 | 9751 | 10247 | 10743 | 11239 | 11735 |
| 265 | 8264 | 8760 | 9256 | 9752 | 10248 | 10744 | 11240 | 11736 |
| 266 | 8265 | 8761 | 9257 | 9753 | 10249 | 10745 | 11241 | 11737 |
| 267 | 8266 | 8762 | 9258 | 9754 | 10250 | 10746 | 11242 | 11738 |
| 268 | 8267 | 8763 | 9259 | 9755 | 10251 | 10747 | 11243 | 11739 |
| 269 | 8268 | 8764 | 9260 | 9756 | 10252 | 10748 | 11244 | 11740 |
| 270 | 8269 | 8765 | 9261 | 9757 | 10253 | 10749 | 11245 | 11741 |
| 271 | 8270 | 8766 | 9262 | 9758 | 10254 | 10750 | 11246 | 11742 |
| 272 | 8271 | 8767 | 9263 | 9759 | 10255 | 10751 | 11247 | 11743 |
| 273 | 8272 | 8768 | 9264 | 9760 | 10256 | 10752 | 11248 | 11744 |
| 274 | 8273 | 8769 | 9265 | 9761 | 10257 | 10753 | 11249 | 11745 |
| 275 | 8274 | 8770 | 9266 | 9762 | 10258 | 10754 | 11250 | 11746 |
| 276 | 8275 | 8771 | 9267 | 9763 | 10259 | 10755 | 11251 | 11747 |
| 277 | 8276 | 8772 | 9268 | 9764 | 10260 | 10756 | 11252 | 11748 |
| 278 | 8277 | 8773 | 9269 | 9765 | 10261 | 10757 | 11253 | 11749 |
| 279 | 8278 | 8774 | 9270 | 9766 | 10262 | 10758 | 11254 | 11750 |
| 280 | 8279 | 8775 | 9271 | 9767 | 10263 | 10759 | 11255 | 11751 |
| 281 | 8280 | 8776 | 9272 | 9768 | 10264 | 10760 | 11256 | 11752 |
| 282 | 8281 | 8777 | 9273 | 9769 | 10265 | 10761 | 11257 | 11753 |
| 283 | 8282 | 8778 | 9274 | 9770 | 10266 | 10762 | 11258 | 11754 |
| 284 | 8283 | 8779 | 9275 | 9771 | 10267 | 10763 | 11259 | 11755 |
| 285 | 8284 | 8780 | 9276 | 9772 | 10268 | 10764 | 11260 | 11756 |
| 286 | 8285 | 8781 | 9277 | 9773 | 10269 | 10765 | 11261 | 11757 |
| 287 | 8286 | 8782 | 9278 | 9774 | 10270 | 10766 | 11262 | 11758 |
| 288 | 8287 | 8783 | 9279 | 9775 | 10271 | 10767 | 11263 | 11759 |
| 289 | 8288 | 8784 | 9280 | 9776 | 10272 | 10768 | 11264 | 11760 |
| 290 | 8289 | 8785 | 9281 | 9777 | 10273 | 10769 | 11265 | 11761 |
| 291 | 8290 | 8786 | 9282 | 9778 | 10274 | 10770 | 11266 | 11762 |
| 292 | 8291 | 8787 | 9283 | 9779 | 10275 | 10771 | 11267 | 11763 |
| 293 | 8292 | 8788 | 9284 | 9780 | 10276 | 10772 | 11268 | 11764 |
| 294 | 8293 | 8789 | 9285 | 9781 | 10277 | 10773 | 11269 | 11765 |
| 295 | 8294 | 8790 | 9286 | 9782 | 10278 | 10774 | 11270 | 11766 |
| 296 | 8295 | 8791 | 9287 | 9783 | 10279 | 10775 | 11271 | 11767 |
| 297 | 8296 | 8792 | 9288 | 9784 | 10280 | 10776 | 11272 | 11768 |
| 298 | 8297 | 8793 | 9289 | 9785 | 10281 | 10777 | 11273 | 11769 |
| 299 | 8298 | 8794 | 9290 | 9786 | 10282 | 10778 | 11274 | 11770 |
| 300 | 8299 | 8795 | 9291 | 9787 | 10283 | 10779 | 11275 | 11771 |
| 301 | 8300 | 8796 | 9292 | 9788 | 10284 | 10780 | 11276 | 11772 |
| 302 | 8301 | 8797 | 9293 | 9789 | 10285 | 10781 | 11277 | 11773 |
| 303 | 8302 | 8798 | 9294 | 9790 | 10286 | 10782 | 11278 | 11774 |
| 304 | 8303 | 8799 | 9295 | 9791 | 10287 | 10783 | 11279 | 11775 |
| 305 | 8304 | 8800 | 9296 | 9792 | 10288 | 10784 | 11280 | 11776 |
| 306 | 8305 | 8801 | 9297 | 9793 | 10289 | 10785 | 11281 | 11777 |
| 307 | 8306 | 8802 | 9298 | 9794 | 10290 | 10786 | 11282 | 11778 |
| 308 | 8307 | 8803 | 9299 | 9795 | 10291 | 10787 | 11283 | 11779 |
| 309 | 8308 | 8804 | 9300 | 9796 | 10292 | 10788 | 11284 | 11780 |
| 310 | 8309 | 8805 | 9301 | 9797 | 10293 | 10789 | 11285 | 11781 |
| 311 | 8310 | 8806 | 9302 | 9798 | 10294 | 10790 | 11286 | 11782 |
| 312 | 8311 | 8807 | 9303 | 9799 | 10295 | 10791 | 11287 | 11783 |
| 313 | 8312 | 8808 | 9304 | 9800 | 10296 | 10792 | 11288 | 11784 |
| 314 | 8313 | 8809 | 9305 | 9801 | 10297 | 10793 | 11289 | 11785 |
| 315 | 8314 | 8810 | 9306 | 9802 | 10298 | 10794 | 11290 | 11786 |
| 316 | 8315 | 8811 | 9307 | 9803 | 10299 | 10795 | 11291 | 11787 |
| 317 | 8316 | 8812 | 9308 | 9804 | 10300 | 10796 | 11292 | 11788 |
| 318 | 8317 | 8813 | 9309 | 9805 | 10301 | 10797 | 11293 | 11789 |
| 319 | 8318 | 8814 | 9310 | 9806 | 10302 | 10798 | 11294 | 11790 |
| 320 | 8319 | 8815 | 9311 | 9807 | 10303 | 10799 | 11295 | 11791 |
| 321 | 8320 | 8816 | 9312 | 9808 | 10304 | 10800 | 11296 | 11792 |
| 322 | 8321 | 8817 | 9313 | 9809 | 10305 | 10801 | 11297 | 11793 |
| 323 | 8322 | 8818 | 9314 | 9810 | 10306 | 10802 | 11298 | 11794 |
| 324 | 8323 | 8819 | 9315 | 9811 | 10307 | 10803 | 11299 | 11795 |
| 325 | 8324 | 8820 | 9316 | 9812 | 10308 | 10804 | 11300 | 11796 |
| 326 | 8325 | 8821 | 9317 | 9813 | 10309 | 10805 | 11301 | 11797 |
| 327 | 8326 | 8822 | 9318 | 9814 | 10310 | 10806 | 11302 | 11798 |
| 328 | 8327 | 8823 | 9319 | 9815 | 10311 | 10807 | 11303 | 11799 |
| 329 | 8328 | 8824 | 9320 | 9816 | 10312 | 10808 | 11304 | 11800 |
| 330 | 8329 | 8825 | 9321 | 9817 | 10313 | 10809 | 11305 | 11801 |
| 331 | 8330 | 8826 | 9322 | 9818 | 10314 | 10810 | 11306 | 11802 |
| 332 | 8331 | 8827 | 9323 | 9819 | 10315 | 10811 | 11307 | 11803 |
| 333 | 8332 | 8828 | 9324 | 9820 | 10316 | 10812 | 11308 | 11804 |
| 334 | 8333 | 8829 | 9325 | 9821 | 10317 | 10813 | 11309 | 11805 |
| 335 | 8334 | 8830 | 9326 | 9822 | 10318 | 10814 | 11310 | 11806 |
| 336 | 8335 | 8831 | 9327 | 9823 | 10319 | 10815 | 11311 | 11807 |
| 337 | 8336 | 8832 | 9328 | 9824 | 10320 | 10816 | 11312 | 11808 |
| 338 | 8337 | 8833 | 9329 | 9825 | 10321 | 10817 | 11313 | 11809 |
| 339 | 8338 | 8834 | 9330 | 9826 | 10322 | 10818 | 11314 | 11810 |
| 340 | 8339 | 8835 | 9331 | 9827 | 10323 | 10819 | 11315 | 11811 |
| 341 | 8340 | 8836 | 9332 | 9828 | 10324 | 10820 | 11316 | 11812 |
| 342 | 8341 | 8837 | 9333 | 9829 | 10325 | 10821 | 11317 | 11813 |
| 343 | 8342 | 8838 | 9334 | 9830 | 10326 | 10822 | 11318 | 11814 |
| 344 | 8343 | 8839 | 9335 | 9831 | 10327 | 10823 | 11319 | 11815 |
| 345 | 8344 | 8840 | 9336 | 9832 | 10328 | 10824 | 11320 | 11816 |
| 346 | 8345 | 8841 | 9337 | 9833 | 10329 | 10825 | 11321 | 11817 |
| 347 | 8346 | 8842 | 9338 | 9834 | 10330 | 10826 | 11322 | 11818 |
| 348 | 8347 | 8843 | 9339 | 9835 | 10331 | 10827 | 11323 | 11819 |
| 349 | 8348 | 8844 | 9340 | 9836 | 10332 | 10828 | 11324 | 11820 |
| 350 | 8349 | 8845 | 9341 | 9837 | 10333 | 10829 | 11325 | 11821 |
| 351 | 8350 | 8846 | 9342 | 9838 | 10334 | 10830 | 11326 | 11822 |
| 352 | 8351 | 8847 | 9343 | 9839 | 10335 | 10831 | 11327 | 11823 |
| 353 | 8352 | 8848 | 9344 | 9840 | 10336 | 10832 | 11328 | 11824 |
| 354 | 8353 | 8849 | 9345 | 9841 | 10337 | 10833 | 11329 | 11825 |
| 355 | 8354 | 8850 | 9346 | 9842 | 10338 | 10834 | 11330 | 11826 |
| 356 | 8355 | 8851 | 9347 | 9843 | 10339 | 10835 | 11331 | 11827 |
| 357 | 8356 | 8852 | 9348 | 9844 | 10340 | 10836 | 11332 | 11828 |
| 358 | 8357 | 8853 | 9349 | 9845 | 10341 | 10837 | 11333 | 11829 |
| 359 | 8358 | 8854 | 9350 | 9846 | 10342 | 10838 | 11334 | 11830 |
| 360 | 8359 | 8855 | 9351 | 9847 | 10343 | 10839 | 11335 | 11831 |
| 361 | 8360 | 8856 | 9352 | 9848 | 10344 | 10840 | 11336 | 11832 |
| 362 | 8361 | 8857 | 9353 | 9849 | 10345 | 10841 | 11337 | 11833 |
| 363 | 8362 | 8858 | 9354 | 9850 | 10346 | 10842 | 11338 | 11834 |
| 364 | 8363 | 8859 | 9355 | 9851 | 10347 | 10843 | 11339 | 11835 |
| 365 | 8364 | 8860 | 9356 | 9852 | 10348 | 10844 | 11340 | 11836 |
| 366 | 8365 | 8861 | 9357 | 9853 | 10349 | 10845 | 11341 | 11837 |
| 367 | 8366 | 8862 | 9358 | 9854 | 10350 | 10846 | 11342 | 11838 |
| 368 | 8367 | 8863 | 9359 | 9855 | 10351 | 10847 | 11343 | 11839 |
| 369 | 8368 | 8864 | 9360 | 9856 | 10352 | 10848 | 11344 | 11840 |
| 370 | 8369 | 8865 | 9361 | 9857 | 10353 | 10849 | 11345 | 11841 |
| 371 | 8370 | 8866 | 9362 | 9858 | 10354 | 10850 | 11346 | 11842 |
| 372 | 8371 | 8867 | 9363 | 9859 | 10355 | 10851 | 11347 | 11843 |
| 373 | 8372 | 8868 | 9364 | 9860 | 10356 | 10852 | 11348 | 11844 |
| 374 | 8373 | 8869 | 9365 | 9861 | 10357 | 10853 | 11349 | 11845 |
| 375 | 8374 | 8870 | 9366 | 9862 | 10358 | 10854 | 11350 | 11846 |
| 376 | 8375 | 8871 | 9367 | 9863 | 10359 | 10855 | 11351 | 11847 |
| 377 | 8376 | 8872 | 9368 | 9864 | 10360 | 10856 | 11352 | 11848 |
| 378 | 8377 | 8873 | 9369 | 9865 | 10361 | 10857 | 11353 | 11849 |
| 379 | 8378 | 8874 | 9370 | 9866 | 10362 | 10858 | 11354 | 11850 |
| 380 | 8379 | 8875 | 9371 | 9867 | 10363 | 10859 | 11355 | 11851 |
| 381 | 8380 | 8876 | 9372 | 9868 | 10364 | 10860 | 11356 | 11852 |
| 382 | 8381 | 8877 | 9373 | 9869 | 10365 | 10861 | 11357 | 11853 |
| 383 | 8382 | 8878 | 9374 | 9870 | 10366 | 10862 | 11358 | 11854 |
| 384 | 8383 | 8879 | 9375 | 9871 | 10367 | 10863 | 11359 | 11855 |
| 385 | 8384 | 8880 | 9376 | 9872 | 10368 | 10864 | 11360 | 11856 |
| 386 | 8385 | 8881 | 9377 | 9873 | 10369 | 10865 | 11361 | 11857 |
| 387 | 8386 | 8882 | 9378 | 9874 | 10370 | 10866 | 11362 | 11858 |
| 388 | 8387 | 8883 | 9379 | 9875 | 10371 | 10867 | 11363 | 11859 |
| 389 | 8388 | 8884 | 9380 | 9876 | 10372 | 10868 | 11364 | 11860 |
| 390 | 8389 | 8885 | 9381 | 9877 | 10373 | 10869 | 11365 | 11861 |
| 391 | 8390 | 8886 | 9382 | 9878 | 10374 | 10870 | 11366 | 11862 |
| 392 | 8391 | 8887 | 9383 | 9879 | 10375 | 10871 | 11367 | 11863 |
| 393 | 8392 | 8888 | 9384 | 9880 | 10376 | 10872 | 11368 | 11864 |
| 394 | 8393 | 8889 | 9385 | 9881 | 10377 | 10873 | 11369 | 11865 |
| 395 | 8394 | 8890 | 9386 | 9882 | 10378 | 10874 | 11370 | 11866 |
| 396 | 8395 | 8891 | 9387 | 9883 | 10379 | 10875 | 11371 | 11867 |
| 397 | 8396 | 8892 | 9388 | 9884 | 10380 | 10876 | 11372 | 11868 |
| 398 | 8397 | 8893 | 9389 | 9885 | 10381 | 10877 | 11373 | 11869 |
| 399 | 8398 | 8894 | 9390 | 9886 | 10382 | 10878 | 11374 | 11870 |
| 400 | 8399 | 8895 | 9391 | 9887 | 10383 | 10879 | 11375 | 11871 |
| 401 | 8400 | 8896 | 9392 | 9888 | 10384 | 10880 | 11376 | 11872 |
| 402 | 8401 | 8897 | 9393 | 9889 | 10385 | 10881 | 11377 | 11873 |
| 403 | 8402 | 8898 | 9394 | 9890 | 10386 | 10882 | 11378 | 11874 |
| 404 | 8403 | 8899 | 9395 | 9891 | 10387 | 10883 | 11379 | 11875 |
| 405 | 8404 | 8900 | 9396 | 9892 | 10388 | 10884 | 11380 | 11876 |
| 406 | 8405 | 8901 | 9397 | 9893 | 10389 | 10885 | 11381 | 11877 |
| 407 | 8406 | 8902 | 9398 | 9894 | 10390 | 10886 | 11382 | 11878 |
| 408 | 8407 | 8903 | 9399 | 9895 | 10391 | 10887 | 11383 | 11879 |
| 409 | 8408 | 8904 | 9400 | 9896 | 10392 | 10888 | 11384 | 11880 |
| 410 | 8409 | 8905 | 9401 | 9897 | 10393 | 10889 | 11385 | 11881 |
| 411 | 8410 | 8906 | 9402 | 9898 | 10394 | 10890 | 11386 | 11882 |
| 412 | 8411 | 8907 | 9403 | 9899 | 10395 | 10891 | 11387 | 11883 |
| 413 | 8412 | 8908 | 9404 | 9900 | 10396 | 10892 | 11388 | 11884 |
| 414 | 8413 | 8909 | 9405 | 9901 | 10397 | 10893 | 11389 | 11885 |
| 415 | 8414 | 8910 | 9406 | 9902 | 10398 | 10894 | 11390 | 11886 |
| 416 | 8415 | 8911 | 9407 | 9903 | 10399 | 10895 | 11391 | 11887 |
| 417 | 8416 | 8912 | 9408 | 9904 | 10400 | 10896 | 11392 | 11888 |
| 418 | 8417 | 8913 | 9409 | 9905 | 10401 | 10897 | 11393 | 11889 |
| 419 | 8418 | 8914 | 9410 | 9906 | 10402 | 10898 | 11394 | 11890 |
| 420 | 8419 | 8915 | 9411 | 9907 | 10403 | 10899 | 11395 | 11891 |
| 421 | 8420 | 8916 | 9412 | 9908 | 10404 | 10900 | 11396 | 11892 |
| 422 | 8421 | 8917 | 9413 | 9909 | 10405 | 10901 | 11397 | 11893 |
| 423 | 8422 | 8918 | 9414 | 9910 | 10406 | 10902 | 11398 | 11894 |
| 424 | 8423 | 8919 | 9415 | 9911 | 10407 | 10903 | 11399 | 11895 |
| 425 | 8424 | 8920 | 9416 | 9912 | 10408 | 10904 | 11400 | 11896 |
| 426 | 8425 | 8921 | 9417 | 9913 | 10409 | 10905 | 11401 | 11897 |
| 427 | 8426 | 8922 | 9418 | 9914 | 10410 | 10906 | 11402 | 11898 |
| 428 | 8427 | 8923 | 9419 | 9915 | 10411 | 10907 | 11403 | 11899 |
| 429 | 8428 | 8924 | 9420 | 9916 | 10412 | 10908 | 11404 | 11900 |
| 430 | 8429 | 8925 | 9421 | 9917 | 10413 | 10909 | 11405 | 11901 |
| 431 | 8430 | 8926 | 9422 | 9918 | 10414 | 10910 | 11406 | 11902 |
| 432 | 8431 | 8927 | 9423 | 9919 | 10415 | 10911 | 11407 | 11903 |
| 433 | 8432 | 8928 | 9424 | 9920 | 10416 | 10912 | 11408 | 11904 |
| 434 | 8433 | 8929 | 9425 | 9921 | 10417 | 10913 | 11409 | 11905 |
| 435 | 8434 | 8930 | 9426 | 9922 | 10418 | 10914 | 11410 | 11906 |
| 436 | 8435 | 8931 | 9427 | 9923 | 10419 | 10915 | 11411 | 11907 |
| 437 | 8436 | 8932 | 9428 | 9924 | 10420 | 10916 | 11412 | 11908 |
| 438 | 8437 | 8933 | 9429 | 9925 | 10421 | 10917 | 11413 | 11909 |
| 439 | 8438 | 8934 | 9430 | 9926 | 10422 | 10918 | 11414 | 11910 |
| 440 | 8439 | 8935 | 9431 | 9927 | 10423 | 10919 | 11415 | 11911 |
| 441 | 8440 | 8936 | 9432 | 9928 | 10424 | 10920 | 11416 | 11912 |
| 442 | 8441 | 8937 | 9433 | 9929 | 10425 | 10921 | 11417 | 11913 |
| 443 | 8442 | 8938 | 9434 | 9930 | 10426 | 10922 | 11418 | 11914 |
| 444 | 8443 | 8939 | 9435 | 9931 | 10427 | 10923 | 11419 | 11915 |
| 445 | 8444 | 8940 | 9436 | 9932 | 10428 | 10924 | 11420 | 11916 |
| 446 | 8445 | 8941 | 9437 | 9933 | 10429 | 10925 | 11421 | 11917 |
| 447 | 8446 | 8942 | 9438 | 9934 | 10430 | 10926 | 11422 | 11918 |
| 448 | 8447 | 8943 | 9439 | 9935 | 10431 | 10927 | 11423 | 11919 |
| 449 | 8448 | 8944 | 9440 | 9936 | 10432 | 10928 | 11424 | 11920 |
| 450 | 8449 | 8945 | 9441 | 9937 | 10433 | 10929 | 11425 | 11921 |
| 451 | 8450 | 8946 | 9442 | 9938 | 10434 | 10930 | 11426 | 11922 |
| 452 | 8451 | 8947 | 9443 | 9939 | 10435 | 10931 | 11427 | 11923 |
| 453 | 8452 | 8948 | 9444 | 9940 | 10436 | 10932 | 11428 | 11924 |
| 454 | 8453 | 8949 | 9445 | 9941 | 10437 | 10933 | 11429 | 11925 |
| 455 | 8454 | 8950 | 9446 | 9942 | 10438 | 10934 | 11430 | 11926 |
| 456 | 8455 | 8951 | 9447 | 9943 | 10439 | 10935 | 11431 | 11927 |
| 457 | 8456 | 8952 | 9448 | 9944 | 10440 | 10936 | 11432 | 11928 |
| 458 | 8457 | 8953 | 9449 | 9945 | 10441 | 10937 | 11433 | 11929 |
| 459 | 8458 | 8954 | 9450 | 9946 | 10442 | 10938 | 11434 | 11930 |
| 460 | 8459 | 8955 | 9451 | 9947 | 10443 | 10939 | 11435 | 11931 |
| 461 | 8460 | 8956 | 9452 | 9948 | 10444 | 10940 | 11436 | 11932 |
| 462 | 8461 | 8957 | 9453 | 9949 | 10445 | 10941 | 11437 | 11933 |
| 463 | 8462 | 8958 | 9454 | 9950 | 10446 | 10942 | 11438 | 11934 |
| 464 | 8463 | 8959 | 9455 | 9951 | 10447 | 10943 | 11439 | 11935 |
| 465 | 8464 | 8960 | 9456 | 9952 | 10448 | 10944 | 11440 | 11936 |
| 466 | 8465 | 8961 | 9457 | 9953 | 10449 | 10945 | 11441 | 11937 |
| 467 | 8466 | 8962 | 9458 | 9954 | 10450 | 10946 | 11442 | 11938 |
| 468 | 8467 | 8963 | 9459 | 9955 | 10451 | 10947 | 11443 | 11939 |
| 469 | 8468 | 8964 | 9460 | 9956 | 10452 | 10948 | 11444 | 11940 |
| 470 | 8469 | 8965 | 9461 | 9957 | 10453 | 10949 | 11445 | 11941 |
| 471 | 8470 | 8966 | 9462 | 9958 | 10454 | 10950 | 11446 | 11942 |
| 472 | 8471 | 8967 | 9463 | 9959 | 10455 | 10951 | 11447 | 11943 |
| 473 | 8472 | 8968 | 9464 | 9960 | 10456 | 10952 | 11448 | 11944 |
| 474 | 8473 | 8969 | 9465 | 9961 | 10457 | 10953 | 11449 | 11945 |
| 475 | 8474 | 8970 | 9466 | 9962 | 10458 | 10954 | 11450 | 11946 |
| 476 | 8475 | 8971 | 9467 | 9963 | 10459 | 10955 | 11451 | 11947 |
| 477 | 8476 | 8972 | 9468 | 9964 | 10460 | 10956 | 11452 | 11948 |
| 478 | 8477 | 8973 | 9469 | 9965 | 10461 | 10957 | 11453 | 11949 |
| 479 | 8478 | 8974 | 9470 | 9966 | 10462 | 10958 | 11454 | 11950 |
| 480 | 8479 | 8975 | 9471 | 9967 | 10463 | 10959 | 11455 | 11951 |
| 481 | 8480 | 8976 | 9472 | 9968 | 10464 | 10960 | 11456 | 11952 |
| 482 | 8481 | 8977 | 9473 | 9969 | 10465 | 10961 | 11457 | 11953 |
| 483 | 8482 | 8978 | 9474 | 9970 | 10466 | 10962 | 11458 | 11954 |
| 484 | 8483 | 8979 | 9475 | 9971 | 10467 | 10963 | 11459 | 11955 |
| 485 | 8484 | 8980 | 9476 | 9972 | 10468 | 10964 | 11460 | 11956 |
| 486 | 8485 | 8981 | 9477 | 9973 | 10469 | 10965 | 11461 | 11957 |
| 487 | 8486 | 8982 | 9478 | 9974 | 10470 | 10966 | 11462 | 11958 |
| 488 | 8487 | 8983 | 9479 | 9975 | 10471 | 10967 | 11463 | 11959 |
| 489 | 8488 | 8984 | 9480 | 9976 | 10472 | 10968 | 11464 | 11960 |
| 490 | 8489 | 8985 | 9481 | 9977 | 10473 | 10969 | 11465 | 11961 |
| 491 | 8490 | 8986 | 9482 | 9978 | 10474 | 10970 | 11466 | 11962 |
| 492 | 8491 | 8987 | 9483 | 9979 | 10475 | 10971 | 11467 | 11963 |
| 493 | 8492 | 8988 | 9484 | 9980 | 10476 | 10972 | 11468 | 11964 |
| 494 | 8493 | 8989 | 9485 | 9981 | 10477 | 10973 | 11469 | 11965 |
| 495 | 8494 | 8990 | 9486 | 9982 | 10478 | 10974 | 11470 | 11966 |
| 496 | 8495 | 8991 | 9487 | 9983 | 10479 | 10975 | 11471 | 11967 |

TABLE 32
A14 Light Chain CDR sequences for GIGA-564 identified by different algorithms
(Antibody A14):

| Region | Definition | Sequence Fragment | Residues | Length |
|---|---|---|---|---|
| LFR1 | Chothia | EIVLTQSPGTLSLSPGERATLSC------ | 1-23 | 23 |
| | | (SEQ ID NO: 11999) | | |
| | AbM | EIVLTQSPGTLSLSPGERATLSC------ | 1-23 | 23 |
| | | (SEQ ID NO: 12000) | | |
| | Kabat | EIVLTQSPGTLSLSPGERATLSC------ | 1-23 | 23 |
| | | (SEQ ID NO: 12001) | | |
| | Contact | EIVLTQSPGTLSLSPGERATLSCRASQSV | 1-29 | 29 |
| | | (SEQ ID NO: 12002) | | |
| | IMGT | [sequence omitted] | 1-26 | 26 |
| | | (SEQ ID NO: 12003) | | |
| CDR-L1 | Chothia | RASQSVSSSYLA- | 24-35 | 12 |
| | | (SEQ ID NO: 12004) | | |
| | AbM | RASQSVSSSYLA- | 24-35 | 12 |
| | | (SEQ ID NO: 12005) | | |
| | Kabat | RASQSVSSSYLA- | 24-35 | 12 |
| | | (SEQ ID NO: 12006) | | |
| | Contact | ------SSSYLAWY (SEQ ID NO: 12007) | 30-37 | 8 |
| | IMGT | ---QSVSSSY---- (SEQ ID NO: 12008) | 27-33 | 7 |
| LFR2 | Chothia | --WYQQKPGQAPRLLIY (SEQ ID NO: 12009) | 36-50 | 15 |
| | AbM | --WYQQKPGQAPRLLIY (SEQ ID NO: 12010) | 36-50 | 15 |
| | Kabat | --WYQQKPGQAPRLLIY (SEQ ID NO: 12011) | 36-50 | 15 |
| | Contact | ----QQKPGQAPR---- (SEQ ID NO: 12012) | 38-46 | 9 |
| | IMGT | LAWYQQKPGQAPRLLIY (SEQ ID NO: 12013) | 34-50 | 17 |
| CDR-L2 | Chothia | ----GASSRAT (SEQ ID NO: 12014) | 51-57 | 7 |
| | AbM | ----GASSRAT (SEQ ID NO: 12015) | 51-57 | 7 |
| | Kabat | ----GASSRAT (SEQ ID NO: 12016) | 51-57 | 7 |
| | Contact | LLIYGASSRA- (SEQ ID NO: 12017) | 47-56 | 10 |
| | IMGT | ----GA----- (SEQ ID NO: 12018) | 51-52 | 2 |
| LFR3 | Chothia | -----GIPDRESGSGSGTDFTLTISRLEPEDFAVYYC | 58-89 | 32 |
| | | (SEQ ID NO: 12019) | | |
| | AbM | -----GIPDRFSGSGSGTDFTLTISRLEPEDFAVYYC | 58-89 | 32 |
| | | (SEQ ID NO: 12020) | | |
| | Kabat | -----GIPDRFSGSGSGTDFTLTISRLEPEDFAVYYC | 58-89 | 32 |
| | | (SEQ ID NO: 12021) | | |
| | Contact | ----TGIPDRFSGSGSGTDFTLTISRLEPEDFAVYYC | 57-89 | 33 |
| | | (SEQ ID NO: 12022) | | |
| | IMGT | SSRATGIPDRFSGSGSGTDFTLTISRLEPEDFAVYYC | 53-89 | 37 |
| | | (SEQ ID NO: 12023) | | |
| CDR-L3 | Chothia | QQYGSSPWT (SEQ ID NO: 12024) | 90-98 | 9 |
| | AbM | QQYGSSPWT (SEQ ID NO: 12025) | 90-98 | 9 |
| | Kabat | QQYGSSPWT (SEQ ID NO: 12026) | 90-98 | 9 |
| | Contact | QQYGSSPW- (SEQ ID NO: 12027) | 90-97 | 8 |
| | IMGT | QQYGSSPWT (SEQ ID NO: 12028) | 90-98 | 9 |
| LFR4 | Chothia | -SGQGTKVEIK (SEQ ID NO: 12029) | 99-108 | 10 |
| | AbM | -SGQGTKVEIK (SEQ ID NO: 12030) | 99-108 | 10 |
| | Kabat | -SGQGTKVEIK (SEQ ID NO: 12031) | 99-108 | 10 |
| | Contact | TSGQGTKVEIK (SEQ ID NO: 12032) | 98-108 | 11 |
| | IMGT | -SGQGTKVEIK (SEQ ID NO: 12033) | 99-108 | 10 |

TABLE 33
A14 Heavy Chain CDR sequences for GIGA-564 identified by different algorithms
(Antibody A14):

| Region | Definition | Sequence Fragment | Residues | Length |
|---|---|---|---|---|
| HFR1 | Chothia | QVQLVESGGGVVQPGRSLRLSCAAS----- (SEQ ID | 1-25 | 25 |
| | | NO: 12034) | | |
| | AbM | QVQLVESGGGVVQPGRSLRLSCAAS----- (SEQ ID | 1-25 | 25 |
| | | NO: 12035) | | |
| | Kabat | QVQLVESGGGVVQPGRSLRLSCAASGFTFS (SEQ ID | 1-30 | 30 |
| | | NO: 12036) | | |
| | Contact | QVQLVESGGGVVQPGRSLRLSCAASGFTF- (SEQ ID | 1-29 | 29 |
| | | NO: 12037) | | |
| | IMGT | QVQLVESGGGVVQPGRSLRLSCAAS----- (SEQ ID | 1-25 | 25 |
| | | NO: 12038) | | |
| CDR-H1 | Chothia | GFTFSSY--- (SEQ ID NO: 12039) | 26-32 | 7 |
| | AbM | GFTFSSYGMH (SEQ ID NO: 12040) | 26-35 | 10 |
| | Kabat | -----SYGMH (SEQ ID NO: 12041) | 31-35 | 5 |
| | Contact | ----SSYGMH (SEQ ID NO: 12042) | 30-35 | 6 |
| | IMGT | GFTFSSYG-- (SEQ ID NO: 12043) | 26-33 | 8 |
| HFR2 | Chothia | GMHWVRQAPGTGLEWVAVI (SEQ ID NO: 12044) | 33-51 | 19 |
| | AbM | ---WVRQAPGTGLEWVA-- (SEQ ID NO: 12045) | 36-49 | 14 |
| | Kabat | ---WVRQAPGTGLEWVA-- (SEQ ID NO: 12046) | 36-49 | 14 |
| | Contact | ---WVROAPGTGLE----- (SEQ ID NO: 12047) | 36-46 | 11 |
| | IMGT | -MHWVRQAPGTGLEWVAV- (SEQ ID NO: 12048) | 34-50 | 17 |
| CDR-H2 | Chothia | -----WYEGRN--------- (SEQ ID NO: 12049) | 52-57 | 6 |
| | AbM | ---VIWYEGRNKY------- (SEQ ID NO: 12050) | 50-59 | 10 |
| | Kabat | ---VIWYEGRNKYYADPVKG (SEQ ID NO: 12051) | 50-66 | 17 |
| | Contact | WVAVIWYEGRNKY------- (SEQ ID NO: 12052) | 47-59 | 13 |
| | IMGT | ----IWYEGRNK-------- (SEQ ID NO: 12053) | 51-58 | 8 |
| HFR3 | Chothia | KYYADPVKGRFTISRDNSKNTLYLQMNSLRDDDTAVYYCAR | 58-98 | 11 |
| | | (SEQ ID NO: 12054) | | |
| | AbM | --YADPVKGRFTISRDNSKNTLYLQMNSLRDDDTAVYYCAR | 60-98 | 39 |
| | | (SEQ ID NO: 12055) | | |
| | Kabat | ---------RFTISRDNSKNTLYLQMNSLRDDDTAVYYCAR | 67-98 | 32 |
| | | (SEQ ID NO: 12056) | | |
| | Contact | ---YADPVKGRFTISRDNSKNTLYLQMNSLRDDDTAVYYC- | 60-96 | 37 |
| | | (SEQ ID NO: 12057) | | |
| | IMGT | --YYADPVKGRFTISRDNSKNTLYLQMNSLRDDDTAVYYC- | 59-96 | 38 |
| | | (SEQ ID NO: 12058) | | |
| CDR-H3 | Chothia | --AGDLGAFDI | 99-107 | 9 |
| | | (SEQ ID NO: 12059) | | |
| | AbM | --AGDLGAFDI (SEQ ID NO: 12060) | 99-107 | 9 |
| | Kabat | --AGDLGAFDI (SEQ ID NO: 12061) | 99-107 | 9 |
| | Contact | ARAGDLGAFD- (SEQ ID NO: 12062) | 97-106 | 10 |
| | IMGT | ARAGDLGAFDI (SEQ ID NO: 12063) | 97-107 | 11 |
| HFR4 | Chothia | -WGQGTMVTVSS (SEQ ID NO: 12064) | 108-118 | 11 |
| | AbM | -WGQGTMVTVSS (SEQ ID NO: 12065) | 108-118 | 11 |
| | Kabat | -WGQGTMVTVSS (SEQ ID NO: 12066) | 108-118 | 11 |
| | Contact | IWGQGTMVTVSS (SEQ ID NO: 12067) | 107-118 | 12 |
| | IMGT | -WGQGTMVTVSS (SEQ ID NO: 12068) | 108-118 | 11 |

TABLE 35
Light Chain sequences, light chain CDR sequences, heavy chain sequences,
and heavy chain CDR sequences of Ipilimumab.

| Ipilimumab | Amino Acid Sequence | SEQ ID NO: |
|---|---|---|
| Variable Heavy Chain (HC) | QVQLVESGGGVVQPGRSLRLSCAA | 12087 |
| | SGFTFSSYTMHWVRQAPGKGLEW | |
| | VTFISYDGNNKYYADSVKGRFTISRD | |
| | NSKNTLYLQMNSLRAEDTAIYYCAR | |
| | TGWLGPFDYWGQGTLVTVSSA | |
| Variable Light Chain (LC) | [sequence omitted] | 12088 |
| | QSVGSSYLAWYQQKPGQAPRLLIY | |
| | GAFSRATGIPDRFSGSGSGTDFTLTI | |
| | SRLEPEDFAVYYCQQYGSSPWTFG | |
| | QGTKVEIK | |
| LC CDR1 | QSVGSSY | 12081 |
| LC CDR2 | GAF | 12082 |
| LC CDR3 | QQYGSSPWT | 12083 |
| HC CDR1 | GFTFSSYT | 12084 |
| HC CDR2 | ISYDGNNK | 12085 |
| HC CDR3 | ARTGWLGPFDY | 12086 |

The application's sequence listing, which the Patent Office published only in electronic form, follows.

SEQUENCE LISTING (12088 sequences)

SEQ ID NO: 1 - protein, 108 aa, Homo sapiens
EIVLTQSPGTLSLSPGEGATLSCRASQSFSSNYLAWYQQKPGQAPRLLIYGASSRATGIPDRFSGSGSGTDFTLTISRLEPEDFAVYYCQQYGTSPFTFGPGTKVDIK

SEQ ID NO: 2 - protein, 108 aa, Homo sapiens
EIVLTQSPGTLSLSPGERATLSCRASQSVSSSYLAWYQQKPGQAPRLLIYGASSRATGIPDRFSGSGSGTDFTLTISRLEPEDFAVYYCQQYGRSPFTFGPGTKVDIK

SEQ ID NO: 3 - protein, 108 aa, Homo sapiens
EIVLTQSPGTLSLSPGERATLSCRASQSVSSSYLAWYQQKPGQAPRLLIYGASSRATGIPDRFSGSGSGTDFTLTISRLEPEDFAVYYCQQYGSSPFTFGPGTKVDIK

SEQ ID NO: 4 - protein, 108 aa, Homo sapiens
EIVLTQSPGTLSLSPGDRATLSCRASQSGSSSYLAWYQQKPGQAPRLLIYGASSRATGIPDRFSGSGSGTDFTLTISRLEPEDFAVYYCQQYGTSPFTSGPGTKVDIK

SEQ ID NO: 5 - protein, 108 aa, Homo sapiens; identical to SEQ ID NO: 4

SEQ ID NO: 6 - protein, 107 aa, Homo sapiens
DIQMTQSPSSLSASVGDRVTITCRASQSISSYLNWYQQKPGKAPKLLIYAASSLQSGVPSRFSGSGSGTDFTLTISSLQPEDFATYYCQQSYSTPFTFGPGTKVDIK

SEQ ID NO: 7 - protein, 108 aa, Homo sapiens; identical to SEQ ID NO: 3

SEQ ID NO: 8 - protein, 106 aa, Homo sapiens
EIVLTQSPGTLSLSPGERATLSCRASQSVSYLAWYQQKPGQAPRLLIYGASSRATGIPDRFSGSGSGTDFTLTISRLEPEDFAVYYCQQYGSSPWTFGQGTKVEIK

SEQ ID NO: 9 - protein, 107 aa, Homo sapiens; identical to SEQ ID NO: 6

SEQ ID NO: 10 - protein, 108 aa, Homo sapiens; identical to SEQ ID NO: 3

SEQ ID NO: 11 - protein, 107 aa, Homo sapiens
DIQLTQSPSFLSASVGDRVTITCRASQGISSYLAWYQQKPGKAPKLLIYAASTLQSGVPSRFSGSGSGTEFTLTISSLQPEDFATYYCQQLNSYPPTFGQGTKVEIK

SEQ ID NO: 12 - protein, 108 aa, Homo sapiens
EIVLTQSPGTLSLSPGERATLSCRASQSVSSSYLAWYQQKPGQAPRLLIYGASSRATGIPDRFSGSGSGTDFTLTISRLEPEDFAVYYCQQYGTSPWTFGQGTKVEIK

SEQ ID NO: 13 - protein, 108 aa, Homo sapiens; identical to SEQ ID NO: 3

SEQ ID NO: 14 - protein, 108 aa, Homo sapiens
EIVLTQSPGTLSLSPGERATLSCRASQSVSSSYLAWYQQKPGQAPRLLIYGASSRATGIPDRFSGSGSGTDFTLTISRLEPEDFAVYYCQQYGSSPWTSGQGTKVEIK

SEQ ID NO: 15 - protein, 108 aa, Homo sapiens; identical to SEQ ID NO: 3

SEQ ID NO: 16 - protein, 107 aa, Homo sapiens
DIQMTQSPSSLSASVGDRVTITCRASQGISNYLAWYQQKPGKVPKLLIYAASTLQSGVPSRFSGSGSGTDFTLTISSLQPEDVATYYCQNYNSAPWTFGQGTKVEIK

SEQ ID NO: 17 - protein, 107 aa, Homo sapiens
DIQMTQSPSSLSASVGDRVTITCRASQAIRNDLGWYQQKPGKAPKRLIYAASSLQSGVPPRFSGSGSGTEFTLTISSLQPEDFATYYCLQHNSYPLTFGGGTKVEIK

SEQ ID NO: 18 - protein, 106 aa, Homo sapiens; identical to SEQ ID NO: 8

SEQ ID NO: 19 - protein, 109 aa, Homo sapiens
EIVLTQSPGTLSLSPGERATLSCRASQSVSSSYLAWYQQKPGQAPRLLIYGASSRATGIPDRFSGSGSGTDFTLTISRLEPEDFAVYYCQQYGSSSMYTFGQGTKLEIK

SEQ ID NO: 20 - protein, 108 aa, Homo sapiens; identical to SEQ ID NO: 2

SEQ ID NO: 21 - protein, 112 aa, Homo sapiens
DIVMTQSPLSLPVTPGEPASISCRSSQSLLHSNGYNYLDWYLQKPGQSPQLLIYLGSNRASGVPDRFSGSGSGTDFTLKISRVEAEDVGVYYCMQTLQTPLTFGGGTKVEIK

SEQ ID NO: 22 - protein, 107 aa, Homo sapiens; identical to SEQ ID NO: 17

SEQ ID NO: 23 - protein, 108 aa, Homo sapiens
EIVLTQSPGTLSLSPGERATLSCRASQSVSSSYLAWYQQKPGQAPRLLIYGASSRATGIPDRFSGSGSGTDFTLTISRLEPEDFAVYYCQQYGPSPWTFGQGTKVEIK

SEQ ID NO: 24 - protein, 107 aa, Homo sapiens
DIQMTQSPSSLSASVGDRVTITCRASQSISSYLNWYQQKPGKAPKLLIYAASSLQSGVPSRFSGSGSGTDFTLTISSLQPEDFATYYCQQSYRTPFTFGPGTKVDIK

SEQ ID NO: 25 - protein, 108 aa, Homo sapiens
EIVMTQSPATLSLSPGERATLSCRASQSVSSSYLSWYQQKPGQAPRLLIYGASTRATGIPARFSGSGSGTDFTLTISNLQPEDFAVYYCQQGYNLPFTAGPGTKVDIK

SEQ ID NO: 26 - protein, 112 aa, Homo sapiens
DVVMTQSPLSLPVTLGQPASISCRSSQSLVYSDGNTYLNWFQQRPGQSPRRLIYKVSNRDSGVPDRFSGSGSGTDFTLKISRVEAEDVGVYYCMQGTHWPITSGQGTRLEIK

SEQ ID NO: 27 - protein, 108 aa, Homo sapiens
EIVLTQSPGTLSLSPGERATLSCRASQSVSSSYLAWYQQKPGQAPRLLIYGASSRATGIPDRFSGSGSGTDFTLTISRLEPEDFAVYHCQQYGRSPWTLGQGTKVEIK

SEQ ID NO: 28 - protein, 108 aa, Homo sapiens; identical to SEQ ID NO: 14

SEQ ID NO: 29-100 - skipped (72 entries)

SEQ ID NO: 101 - protein, 120 aa, Homo sapiens
QVQLVESGGGVVQPGRSLRLSCAASGFTFSSFGMHWVRQAPGKGLEWVAVIWYDGRNKYYVDSVKGRFTISRDNSNNTLYLQMNSLRAEDTAVYYCARGEFFGEFFDYWGQGTLVTVSSA

SEQ ID NO: 102 - protein, 120 aa, Homo sapiens
QVQLVESGGGVVQPGRSLRLSCAASGFTFSNYGMNWVRQAPGKGLEWVAVIWYDGRNKHYADSVKGRFTISRDNSKNTLYLQMNSLRAEDTAVYYCARGGDWGPYFDYWGQGTLVTVSSA

SEQ ID NO: 103 - protein, 120 aa, Homo sapiens
QVQLVESGGGVVQPGRSLRLSCIASGFTFSSYGMHWVRQAPGKGLEWVAVNWYDGSNKHYADSVKGRFTISRDNSKNTLYLQMNSLRAEDTAVYYCARGGVWGPYFDYWGQGTLVTVSSA

SEQ ID NO: 104 - protein, 119 aa, Homo sapiens
QVQLVESGGGVVQPGRSLRISCAASGFTFSSYGIHWVRQAPGKGLQWVAVIWYDGRNKYYADSVKGRFTISRDNSKNTLYLQMNSLRAEDTAVYYCSRSGSFGAFDIWGQGTMVTVSSA

SEQ ID NO: 105 - protein, 121 aa, Homo sapiens
QVQLVESGGGVVQPGRSLRLSCAASGFTFSSYGMHWVRQAPGKGLEWVAVIWYDGNNKYYADSVKGRFTISRDNSKNTLYLQMYSLRAEDTAVYYCARGGILAAGIFDYWGQGTLVTVSSA

SEQ ID NO: 106 - protein, 124 aa, Homo sapiens
QVQLVESGGGVVQPGRSLRLSCAASGFTFSSYGMHWVRQAPGKGLEWVAVIWYDGSYKYYADSVKGRFTISRDDSKNTLYLQMSSLRAEDTAVYYCARAPHYAILTGYYEDYWGQGTLVTVSSA

SEQ ID NO: 107 - protein, 119 aa, Homo sapiens
QVQLVESGGGVVQPGRSLRLSCAASGFTLSSFGMHWVRQAPGKGLEWVAVIWYDGSNKYYADSVKGRFIISRDNSKTALYLQMNSLRAEDTAVYYCARAHYFGAFDIWGQGTMVTVSSA

SEQ ID NO: 108 - protein, 119 aa, Homo sapiens
QVQLVESGGGVVQPGRSLRLSCAASGFTFSRYGMHWVRQAPGKGLEWVAVIWYDGRNKYYADSVKGRFTISRDNSKNTLYLQMNSLRAEDTALYSCARAGELGPFDYWGQGTLVTVSSA

SEQ ID NO: 109 - protein, 120 aa, Homo sapiens
QVQLVESGGGVVQPGRSLRLSCAASGFTFSSHGMHWVRQAPGKGLEWVAVIWYDGSNKHYADSVKGRFTISRDNSKNTLYLQMNSLRAEDTAVYYCARGDILTGYYGYWGQGTLVTVSSA

SEQ ID NO: 110 - protein, 119 aa, Homo sapiens
QVQLVESGGGVVQPGRSLRLSCVASGFTLSSYGMHWVRQAPGKGLEWVAVIWYDGSNKHYADSVKGRFTISRDNSKNTLSLQMNSLRAEDTAVYYCARGGQLGPFDYWGQGTLVTVSSA

SEQ ID NO: 111 - protein, 123 aa, Homo sapiens
QVQLVESGGGVVQPGRSLRLSCAASGFTFSSYGMHWVRQAPGKGLEWVAVIWYDVGNKYYIDSVKGRFTISRDNSKNTLYLQMNSLRAEDTAVYYCARDYYGSGSPRHFDYWGQGTLVTVSSA

SEQ ID NO: 112 - protein, 119 aa, Homo sapiens
QVQLVESGGGVVQPGRSLRLSCAASGFTFSSYGMHWVRQAPGKGLEWVAVIWYDGSNKYYADSVKGRFTFSRDNSKNTLYLQMNSLRAEDTAVYYCARGGLMGAFDYWGQGTLVTVSSA

SEQ ID NO: 113 - protein, 120 aa, Homo sapiens
QVQLVESGGGVVQPGRSLRLSCAASGFTFSSYGMHWVRQAPGKGLEWVAVIWYDGRNKDYADSVKGRITISRDNSKNTLYLQMNSLRAEDTAVYYCARGGLLGPYFDYWGQGTLVTVSSA

SEQ ID NO: 114 - protein, 119 aa, Homo sapiens
QVQLVESGGGVVQPGRSLRLSCAASGFTFSSYGMHWVRQAPGTGLEWVAVIWYEGRNKYYADPVKGRFTISRDNSKNTLYLQMNSLRDDDTAVYYCARAGDLGAFDIWGQGTMVTVSSA

SEQ ID NO: 115 - protein, 119 aa, Homo sapiens
QVQLVESGGGVVQPGRSLRLSCAASGFTFRSYGMHWVRQAPGKGLEWVAVIWYDGSNKHYADSVKGRFTISRDNSKNTLYLQMNSLRAEDTAVYYCARNGLIGAFDIWGQGTMVTVSSA

SEQ ID NO: 116 - protein, 119 aa, Homo sapiens
QVQLVESGGGVVQPGRSLRLSCAASGFTFSSYGIHWVRQAPGKGLEWVAVIWYDGSNKYYADSVKGRFTISRDNSKNTLYLQMNSLRAEDTAVYYCARGSLLGPFDYWGQGTLVTVSSA

SEQ ID NO: 117 - protein, 119 aa, Homo sapiens
EVQLVESGGGLVQPGGSLRLSCAASGFTFSNYAMSWVRQAPGKGLEWVSAISGGGLSTYYADSVKGRFTISRDNSKNTLYLQMNSLRAEDTAVYYCAKDLLWLGFDYWGQGTLVTVSSA

SEQ ID NO: 118 - protein, 119 aa, Homo sapiens
QVQLVESGGGVVQPGRSLRLSCAASGFTFSSYGMHWVRQAPGKGLEWVAVIWYDGSNKFYADSVKGRFTISSDNSKNTLYLQMNSLRAEDTAVYYCARGGHLGSFDYWGQGTLVTVSSA

SEQ ID NO: 119 - protein, 124 aa, Homo sapiens
QVQLVQSGAEVKKPGASVKVSCKASGYTFTSYYMHWVRQAPGQGLEWMGIINPSVGSTSYAQKFQGRVTMTRDTSTSTVYMELSSLRSEDTAVYYCAREVRVRGVIIPFFDYWDQGTLVTVSSA

SEQ ID NO: 120 - protein, 117 aa, Homo sapiens
QVQLVQSGAEVKKPGASVKVSCKASGYTFTSYGISWVRQAPGQGLEWMGWISAYNGNTNYAQKFQGRVTMTTDTSTSTAYMELRSLRSDDTAVYYCAKVSGYFDYWGQGTLVTVSSA

SEQ ID NO: 121 - protein, 123 aa, Homo sapiens
QVQLVESGGGVVQPGRSLRLSCAASGFTFSSYGMHWVRQAPGKGLEWVAVIWYDGNNKYYADSVKGRFTISRDNSKNTLYLHMNSLRADDTAVYYCARMLRGAPYYYGMDVWGQGTTVTVSSA

SEQ ID NO: 122 - protein, 119 aa, Homo sapiens
EVQLVESGGGLVQPGGSLRLSCAASGFTFSSYAMSWVRQAPGKGLEWVSGISGSGGSTYYADSVKGRFTISRDNSKNTLYLQMNSLRAEDTAVYYCAKLGIAWYFDVWGRGTLVTVSSA

SEQ ID NO: 123 - protein, 119 aa, Homo sapiens
QVQLVQSGAEVKKPGASVKVSCKASGYTFTSYGISWVRQAPGQGLEWMGWISAYNGNTYYAQKFQGRVTMTTDTSTSTAYVELRSLRSDDTAVYYCARVTGRDAFDIWGQGTMVTVSSA

SEQ ID NO: 124 - protein, 118 aa, Homo sapiens
QVQLVQSGAEVKKPGASVKVSCKASGYTFTSYGISWVRQAPGQGLECMGWISAYNGNTNYAQKFQGRVTMITDTSTSTAYMELRSLRSDDTAVYYCARVGPINLDYWGQGTLVTVSSA

SEQ ID NO: 125 - protein, 118 aa, Homo sapiens
QVQLVQSGAEVKKPGASVKVSCKASGYTFTNYGISWVRQAPGQGLEWMGWISVYNGNTNYAQKFQGRVTMTTDTSTSTAYMELRSLISDDTAVYYCARLGKGLFDYWGQGTLVTVSSA

SEQ ID NO: 126 - protein, 121 aa, Homo sapiens
QVQLVQSGAEVKKPGASVKVSCKASDYTFTYYGISWVRQAPGQGLEWMGWISAYNGNTNYAQKLQGRVTMTTDTSTNTAYLELRSLRSDDTAVYYCARDYYDSSGYFDYWGQGTLVTVSSA

SEQ ID NO: 127 - protein, 117 aa, Homo sapiens
QVQLVQSGAEVKKPGASVKVSCKASGYTFTSYGISWVRQAPGQGLEWMGWISAYNGNTNYAQKLQGRVTMTTDTSTSTAYMELRSLRSDDTAVYYCGRWVRGVEYWGQGTLVTVSSA

SEQ ID NO: 128 - protein, 119 aa, Homo sapiens
QVQLVESGGGVVQPGRSLGLSCAASGFTFSTYGMHWVRQAPGKGLEWVAVTLYDGSNKYYADSVKGRFTISRDNSKNTLYLQMNSLRAEDTAVYYCARASLTGSFDYWGQGTLVTVSSA

SEQ ID NO: 129-1000 - skipped (872 entries)

SEQ ID NO: 1001 - protein, 7 aa, Homo sapiens
QSFSSNY

SEQ ID NO: 1002 - protein, 7 aa, Homo sapiens
QSVSSSY

SEQ ID NO: 1003 - protein, 7 aa, Homo sapiens
QSVSSSY

SEQ ID NO: 1004 - protein, 7 aa, Homo sapiens
QSGSSSY

SEQ ID NO: 1005 - protein, 7 aa, Homo sapiens
QSGSSSY

SEQ ID NO: 1006 - protein, 6 aa, Homo sapiens
QSISSY

SEQ ID NO: 1007 - protein, 7 aa, Homo sapiens
QSVSSSY

SEQ ID NO: 1008 - protein, 5 aa, Homo sapiens
QSVSY

SEQ ID NO: 1009 - protein, 6 aa, Homo sapiens
QSISSY

SEQ ID NO: 1010 - protein, 7 aa, Homo sapiens
QSVSSSY

SEQ ID NO: 1011 - protein, 6 aa, Homo sapiens
QGISSY

SEQ ID NO: 1012 - protein, 7 aa, Homo sapiens
QSVSSSY

SEQ ID NO: 1013 - protein, 7 aa, Homo sapiens
QSVSSSY

SEQ ID NO: 1014 - protein, 7 aa, Homo sapiens
QSVSSSY

SEQ ID NO: 1015 - protein, 7 aa, Homo sapiens
QSVSSSY

SEQ ID NO: 1016 - protein, 6 aa, Homo sapiens
QGISNY

SEQ ID NO: 1017 - protein, 6 aa, Homo sapiens
QAIRND

SEQ ID NO: 1018 - protein, 5 aa, Homo sapiens
QSVSY

SEQ ID NO: 1019 - protein, 7 aa, Homo sapiens
QSVSSSY

SEQ ID NO: 1020 - protein, 7 aa, Homo sapiens
QSVSSSY

SEQ ID NO: 1021 - protein, 11 aa, Homo sapiens
QSLLHSNGYNY

SEQ ID NO: 1022 - protein, 6 aa, Homo sapiens
QAIRND

SEQ ID NO: 1023 - protein, 7 aa, Homo sapiens
QSVSSSY

SEQ ID NO: 1024 - protein, 6 aa, Homo sapiens
QSISSY

SEQ ID NO: 1025 - protein, 7 aa, Homo sapiens
QSVSSSY

SEQ ID NO: 1026 - protein, 11 aa, Homo sapiens
QSLVYSDGNTY

SEQ ID NO: 1027 - protein, 7 aa, Homo sapiens
QSVSSSY

SEQ ID NO: 1028 - protein, 7 aa, Homo sapiens
QSVSSSY

SEQ ID NO: 1029-2000 - skipped (972 entries)

SEQ ID NO: 2001 - protein, 3 aa, Homo sapiens
GAS

SEQ ID NO: 2002 - protein, 3 aa, Homo sapiens
GAS

SEQ ID NO: 2003 - protein, 3 aa, Homo sapiens
GAS

SEQ ID NO: 2004 - protein, 3 aa, Homo sapiens
GAS

SEQ ID NO: 2005 - protein, 3 aa, Homo sapiens
GAS

SEQ ID NO: 2006 - protein, 3 aa, Homo sapiens
AAS

SEQ ID NO: 2007 - protein, 3 aa, Homo sapiens
GAS

SEQ ID NO: 2008 - protein, 3 aa, Homo sapiens
GAS

SEQ ID NO: 2009 - protein, 3 aa, Homo sapiens
AAS

SEQ ID NO: 2010 - protein, 3 aa, Homo sapiens
GAS

SEQ ID NO: 2011 - protein, 3 aa, Homo sapiens
AAS

SEQ ID NO: 2012 - protein, 3 aa, Homo sapiens
GAS

SEQ ID NO: 2013 - protein, 3 aa, Homo sapiens
GAS

SEQ ID NO: 2014 - protein, 3 aa, Homo sapiens
GAS

SEQ ID NO: 2015 - protein, 3 aa, Homo sapiens
GAS

SEQ ID NO: 2016 - protein, 3 aa, Homo sapiens
AAS

SEQ ID NO: 2017 - protein, 3 aa, Homo sapiens
AAS

SEQ ID NO: 2018 - protein, 3 aa, Homo sapiens
GAS

SEQ ID NO: 2019 - protein, 3 aa, Homo sapiens
GAS

SEQ ID NO: 2020 - protein, 3 aa, Homo sapiens
GAS

SEQ ID NO: 2021 - protein, 3 aa, Homo sapiens
LGS

SEQ ID NO: 2022 - protein, 3 aa, Homo sapiens
AAS

SEQ ID NO: 2023 - protein, 3 aa, Homo sapiens
GAS

SEQ ID NO: 2024 - protein, 3 aa, Homo sapiens
AAS

SEQ ID NO: 2025 - protein, 3 aa, Homo sapiens
GAS

SEQ ID NO: 2026 - protein, 3 aa, Homo sapiens
KVS

SEQ ID NO: 2027 - protein, 3 aa, Homo sapiens
GAS

SEQ ID NO: 2028 - protein, 3 aa, Homo sapiens
GAS

SEQ ID NO: 2029-3000 - skipped (972 entries)

SEQ ID NO: 3001 - protein, 9 aa, Homo sapiens
QQYGTSPFT

SEQ ID NO: 3002 - protein, 9 aa, Homo sapiens
QQYGRSPFT

SEQ ID NO: 3003 - protein, 9 aa, Homo sapiens
QQYGSSPFT

SEQ ID NO: 3004 - protein, 9 aa, Homo sapiens
QQYGTSPFT

SEQ ID NO: 3005 - protein, 9 aa, Homo sapiens
QQYGTSPFT

SEQ ID NO: 3006 - protein, 9 aa, Homo sapiens
QQSYSTPFT

SEQ ID NO: 3007 - protein, 9 aa, Homo sapiens
QQYGSSPFT

SEQ ID NO: 3008 - protein, 9 aa, Homo sapiens
QQYGSSPWT

SEQ ID NO: 3009 - protein, 9 aa, Homo sapiens
QQSYSTPFT

SEQ ID NO: 3010 - protein, 9 aa, Homo sapiens
QQYGSSPFT

SEQ ID NO: 3011 - protein, 9 aa, Homo sapiens
QQLNSYPPT

SEQ ID NO: 3012 - protein, 9 aa, Homo sapiens
QQYGTSPWT

SEQ ID NO: 3013 - protein, 9 aa, Homo sapiens
QQYGSSPFT

SEQ ID NO: 3014 - protein, 9 aa, Homo sapiens
QQYGSSPWT

SEQ ID NO: 3015 - protein, 9 aa, Homo sapiens
QQYGSSPFT

SEQ ID NO: 3016 - protein, 9 aa, Homo sapiens
QNYNSAPWT

SEQ ID NO: 3017 - protein, 9 aa, Homo sapiens
LQHNSYPLT

SEQ ID NO: 3018 - protein, 9 aa, Homo sapiens
QQYGSSPWT

SEQ ID NO: 3019 - protein, 10 aa, Homo sapiens
QQYGSSSMYT

SEQ ID NO: 3020 - protein, 9 aa, Homo sapiens
QQYGRSPFT

SEQ ID NO: 3021 - protein, 9 aa, Homo sapiens
MQTLQTPLT

SEQ ID NO: 3022 - protein, 9 aa, Homo sapiens
LQHNSYPLT

SEQ ID NO: 3023 - protein, 9 aa, Homo sapiens
QQYGPSPWT

SEQ ID NO: 3024 - protein, 9 aa, Homo sapiens
QQSYRTPFT

SEQ ID NO: 3025 - protein, 9 aa, Homo sapiens
QQGYNLPFT

SEQ ID NO: 3026 - protein, 9 aa, Homo sapiens
MQGTHWPIT

SEQ ID NO: 3027 - protein, 9 aa, Homo sapiens
QQYGRSPWT

SEQ ID NO: 3028 - protein, 9 aa, Homo sapiens
QQYGSSPWT

SEQ ID NO: 3029-4000 - skipped (972 entries)

SEQ ID NO: 4001 - protein, 8 aa, Homo sapiens
GFTFSSFG

SEQ ID NO: 4002 - protein, 8 aa, Homo sapiens
GFTFSNYG

SEQ ID NO: 4003 - protein, 8 aa, Homo sapiens
GFTFSSYG

SEQ ID NO: 4004 - protein, 8 aa, Homo sapiens
GFTFSSYG

SEQ ID NO: 4005 - protein, 8 aa, Homo sapiens
GFTFSSYG

SEQ ID NO: 4006 - protein, 8 aa, Homo sapiens
GFTFSSYG

SEQ ID NO: 4007 - protein, 8 aa, Homo sapiens
GFTLSSFG

SEQ ID NO: 4008 - protein, 8 aa, Homo sapiens
GFTFSRYG

SEQ ID NO: 4009 - protein, 8 aa, Homo sapiens
GFTFSSHG

SEQ ID NO: 4010 - protein, 8 aa, Homo sapiens
GFTLSSYG

SEQ ID NO: 4011 - protein, 8 aa, Homo sapiens
GFTFSSYG

SEQ ID NO: 4012 - protein, 8 aa, Homo sapiens
GFTFSSYG

SEQ ID NO: 4013 - protein, 8 aa, Homo sapiens
GFTFSSYG

SEQ ID NO: 4014 - protein, 8 aa, Homo sapiens
GFTFSSYG

SEQ ID NO: 4015 - protein, 8 aa, Homo sapiens
GFTFRSYG

SEQ ID NO: 4016 - protein, 8 aa, Homo sapiens
GFTFSSYG

SEQ ID NO: 4017 - protein, 8 aa, Homo sapiens
GFTFSNYA

SEQ ID NO: 4018 - protein, 8 aa, Homo sapiens
GFTFSSYG

SEQ ID NO: 4019 - protein, 8 aa, Homo sapiens
GYTFTSYY

SEQ ID NO: 4020 - protein, 8 aa, Homo sapiens
GYTFTSYG

SEQ ID NO: 4021 - protein, 8 aa, Homo sapiens
GFTFSSYG

SEQ ID NO: 4022 - protein, 8 aa, Homo sapiens
GFTFSSYA

SEQ ID NO: 4023 - protein, 8 aa, Homo sapiens
GYTFTSYG

SEQ ID NO: 4024 - protein, 8 aa, Homo sapiens
GYTFTSYG

SEQ ID NO: 4025 - protein, 8 aa, Homo sapiens
GYTFTNYG

SEQ ID NO: 4026 - protein, 8 aa, Homo sapiens
DYTFTYYG

SEQ ID NO: 4027 - protein, 8 aa, Homo sapiens
GYTFTSYG

SEQ ID NO: 4028 - protein, 8 aa, Homo sapiens
GFTFSTYG

SEQ ID NO: 4029-5000 - skipped (972 entries)

SEQ ID NO: 5001 - protein, 8 aa, Homo sapiens
IWYDGRNK

SEQ ID NO: 5002 - protein, 8 aa, Homo sapiens
IWYDGRNK

SEQ ID NO: 5003 - protein, 8 aa, Homo sapiens
NWYDGSNK

SEQ ID NO: 5004 - protein, 8 aa, Homo sapiens
IWYDGRNK

SEQ ID NO: 5005 - protein, 8 aa, Homo sapiens
IWYDGNNK

SEQ ID NO: 5006 - protein, 8 aa, Homo sapiens
IWYDGSYK

SEQ ID NO: 5007 - protein, 8 aa, Homo sapiens
IWYDGSNK

SEQ ID NO: 5008 - protein, 8 aa, Homo sapiens
IWYDGRNK

SEQ ID NO: 5009 - protein, 8 aa, Homo sapiens
IWYDGSNK

SEQ ID NO: 5010 - protein, 8 aa, Homo sapiens
IWYDGSNK

SEQ ID NO: 5011 - protein, 8 aa, Homo sapiens
IWYDVGNK

SEQ ID NO: 5012 - protein, 8 aa, Homo sapiens
IWYDGSNK

SEQ ID NO: 5013 - protein, 8 aa, Homo sapiens
IWYDGRNK

SEQ ID NO: 5014 - protein, 8 aa, Homo sapiens
IWYEGRNK

SEQ ID NO: 5015 - protein, 8 aa, Homo sapiens
IWYDGSNK

SEQ ID NO: 5016 - protein, 8 aa, Homo sapiens
IWYDGSNK

SEQ ID NO: 5017 - protein, 8 aa, Homo sapiens
ISGGGLST

SEQ ID NO: 5018 - protein, 8 aa, Homo sapiens
IWYDGSNK

SEQ ID NO: 5019 - protein, 8 aa, Homo sapiens
INPSVGST

SEQ ID NO: 5020 - protein, 8 aa, Homo sapiens
ISAYNGNT

SEQ ID NO: 5021 - protein, 8 aa, Homo sapiens
IWYDGNNK

SEQ ID NO: 5022 - protein, 8 aa, Homo sapiens
ISGSGGST

SEQ ID NO: 5023 - protein, 8 aa, Homo sapiens
ISAYNGNT

SEQ ID NO: 5024 - protein, 8 aa, Homo sapiens
ISAYNGNT

SEQ ID NO: 5025 - protein, 8 aa, Homo sapiens
ISVYNGNT

SEQ ID NO: 5026 - protein, 8 aa, Homo sapiens
ISAYNGNT

SEQ ID NO: 5027 - protein, 8 aa, Homo sapiens
ISAYNGNT

SEQ ID NO: 5028 - protein, 8 aa, Homo sapiens
TLYDGSNK

SEQ ID NO: 5029-6000 - skipped (972 entries)

SEQ ID NO: 6001 - protein, 12 aa, Homo sapiens
ARGEFFGEFFDY

SEQ ID NO: 6002 - protein, 12 aa, Homo sapiens
ARGGDWGPYFDY

SEQ ID NO: 6003 - protein, 12 aa, Homo sapiens
ARGGVWGPYFDY

SEQ ID NO: 6004 - protein, 11 aa, Homo sapiens
SRSGSFGAFDI

SEQ ID NO: 6005 - protein, 13 aa, Homo sapiens
ARGGILAAGIFDY

SEQ ID NO: 6006 - protein, 16 aa, Homo sapiens
ARAPHYAILTGYYEDY

SEQ ID NO: 6007 - protein, 11 aa, Homo sapiens
ARAHYFGAFDI

SEQ ID NO: 6008 - protein, 11 aa, Homo sapiens
ARAGELGPFDY

SEQ ID NO: 6009 - protein, 12 aa, Homo sapiens
ARGDILTGYYGY

SEQ ID NO: 6010 - protein, 11 aa, Homo sapiens
ARGGQLGPFDY

SEQ ID NO: 6011 - protein, 15 aa, Homo sapiens
ARDYYGSGSPRHFDY

SEQ ID NO: 6012 - protein, 11 aa, Homo sapiens
ARGGLMGAFDY

SEQ ID NO: 6013 - protein, 12 aa, Homo sapiens
ARGGLLGPYFDY

SEQ ID NO: 6014 - protein, 11 aa, Homo sapiens
ARAGDLGAFDI

SEQ ID NO: 6015 - protein, 11 aa, Homo sapiens
ARNGLIGAFDI

SEQ ID NO: 6016 - protein, 11 aa, Homo sapiens
ARGSLLGPFDY

SEQ ID NO: 6017 - protein, 11 aa, Homo sapiens
AKDLLWLGFDY

SEQ ID NO: 6018 - protein, 11 aa, Homo sapiens
ARGGHLGSFDY

SEQ ID NO: 6019 - protein, 16 aa, Homo sapiens
AREVRVRGVIIPFFDY

SEQ ID NO: 6020 - protein, 9 aa, Homo sapiens
AKVSGYFDY

SEQ ID NO: 6021 - protein, 15 aa, Homo sapiens
ARMLRGAPYYYGMDV

SEQ ID NO: 6022 - protein, 11 aa, Homo sapiens
AKLGIAWYFDV

SEQ ID NO: 6023 - protein, 11 aa, Homo sapiens
ARVTGRDAFDI

SEQ ID NO: 6024 - protein, 10 aa, Homo sapiens
ARVGPINLDY

SEQ ID NO: 6025 - protein, 10 aa, Homo sapiens
ARLGKGLFDY

SEQ ID NO: 6026 - protein, 13 aa, Homo sapiens
ARDYYDSSGYFDY

SEQ ID NO: 6027 - protein, 9 aa, Homo sapiens
GRWVRGVEY

SEQ ID NO: 6028 - protein, 11 aa, Homo sapiens
ARASLTGSFDY

SEQ ID NO: 6029-7000 - skipped (972 entries)

SEQ ID NO: 7001 - protein, 223 aa, Homo sapiens [sequence omitted]

SEQ ID NO: 7002 - protein, 8 aa, Artificial Sequence
  Description of Artificial Sequence: Synthetic peptide
DYKDDDDK

SEQ ID NO: 7003-7999 - skipped (997 entries)

SEQ ID NO: 8000 - protein, 107 aa, Homo sapiens
  Light chain
DIQMTQSPSSLSASVGDRVTITCRASQSISSYLNWYQQKPGKAPKLLIYASSSLQSGVPSRFSGSRSGTDFTLTISSLQPEDFATYYCQQSYSTPYTFGQGTKLEIK

SEQ ID NO: 8001 - protein, 107 aa, Homo sapiens
  Light chain
DIQMTQSPSSLSASVGDRVTITCRASQGISNYLAWYQQKPGKVPKLLIYAASTLQSGVPSRFSGSGSGTDFTLTISSLQPEDVATYYCQKYNSAPLTFGGGTKVEIK

SEQ ID NO: 8002 - protein, 107 aa, Homo sapiens
  Light chain
EIVMTQSPATLSVSPGERATLSCRASQSVSSNLAWYQQKPGQAPRLLIYGASTRATGIPARFSGSGSGTEFTLTISSLQSEDFAVYYCQQYNNWPYTFGQGTKLEIK

SEQ ID NO: 8003 - protein, 107 aa, Homo sapiens
  Light chain
DIQMTQSPSSLSASVGDRVTITCRASQGIRNDLGWYQQKPGKAPKRLIYAASSLQSGVPSRFSGSGSGTEFTLTISSLQPEDFATYYCLQHNTYPFTFGPGTKVDIK

SEQ ID NO: 8004 - protein, 107 aa, Homo sapiens
  Light chain
DIQMTQSPSSLSASVGDRVTITCRASQGIRNDLGWYQQKPGKAPKRLIYAASSLQSGVPSRFSGSGSGTEFTLTISSLQPEDFATYYCLQHNSYPYTFGQGTKLEIK

SEQ ID NO: 8005 - protein, 107 aa, Homo sapiens; identical to SEQ ID NO: 8004
  Light chain

SEQ ID NO: 8006 - protein, 107 aa, Homo sapiens
  Light chain
DIQLTQSPSFLSASVGDRVTITCRASQGISSYLAWYQQKPGKAPKLLIYAASTLQSGVPSRFSGSGSGTEFTLTISSLQPEDFATYYCQQFNSYPYTFGQGTKLEIK

SEQ ID NO: 8007 - protein, 108 aa, Homo sapiens
  Light chain
EIVLTQSPGTLSLSPGERATLSCRASQSVSSSYLAWYQQKPGQAPRLLIYGASSRATGIPDRFSGSGSGTDFTLTISRLEPEDFAVYYCQQYGNSPYTFGQGTKLEIK

SEQ ID NO: 8008 - protein, 107 aa, Homo sapiens
  Light chain
DIQMTQSPSSLSASVGDRVTITCRASQGIRNDLGWYQQKPGKAPKRLIYAASSLQSGVPSRFSGSGSGTEFTLTISSLQPEDFATYYCLQHNSYPWTFGQGTKVEIK

SEQ ID NO: 8009 - protein, 107 aa, Homo sapiens; identical to SEQ ID NO: 8008
  Light chain

SEQ ID NO: 8010 - protein, 107 aa, Homo sapiens; identical to SEQ ID NO: 8008
  Light chain

SEQ ID NO: 8011 - protein, 107 aa, Homo sapiens
  Light chain
DIQMTQSPSSLSASVGDRVTITCRASQVIRNDLGWYQQKPGKAPKRLIYAASSLQSGVPSRFTGSGSGTEFTLTISSLQPEDFATYYCLQHNSYPFTFGPGTKVDIK

SEQ ID NO: 8012 - protein, 108 aa, Homo sapiens
  Light chain
EIVLTQSPGILSLSPGERATLSCRTSQSVSSSYFAWYQQIPGQAPRLLIYGTSSRATGIPDRFSGSGSGTDFTLTISRLEPEDFAVYYCQQYGSSPRTFGQGTKVEIK

SEQ ID NO: 8013 - protein, 107 aa, Homo sapiens
  Light chain
EIVLTQSPGTLSLSPGERATLSCRASQSVSSSYLAWYQQKPGQAPRLLIYGASSRATGIPDRFSGSGSGTDFTLTISRLEPEDFAVYYCQQYGSSYTFGQGTKLEIK

SEQ ID NO: 8014 - protein, 107 aa, Homo sapiens
  Light chain
DIQMTQSPSSLSASVGDRVTITCRASQGISNYLAWYQQKPGKVPKLLIYAASTLQSGVPSRFSGSGSGTDFTLTISSLQPEDVATYYCQKYNSAPYTFGQGTKLEIK

SEQ ID NO: 8015 - protein, 107 aa, Homo sapiens
  Light chain
DIQMTQSPSSLSASVGDRVTITCRASQGIRNDLGWYQQKPGKAPKRLIYAASSLQSGVPSRFSGSGSGTEFTLTISSLQPEDFATYYCQQLNSYPRTFGQGTKVEIK

SEQ ID NO: 8016 - protein, 107 aa, Homo sapiens; identical to SEQ ID NO: 8008
  Light chain

SEQ ID NO: 8017 - protein, 107 aa, Homo sapiens
  Light chain
DIQMTQSPSSLSASVGDRVTITCRASQSISSYLNWYQQKPGKAPKLLIYAASSLQSGVPSRFSGSGSGTDFTLTISSLQPEDFATYYCQQSYSTPITFGQGTRLEIK

SEQ ID NO: 8018 - protein, 107 aa, Homo sapiens
  Light chain
DIQLTQSPSFLSAFVGDRVTITCRASQGISRYLAWYQQKPGKAPKLLIYTASTLQSGVPSRFSGSGSGTEFTLTISSLQPEDFATYYCQQLNSYPYTFGQGTKLEIK

SEQ ID NO: 8019 - protein, 107 aa, Homo sapiens; identical to SEQ ID NO: 8000
  Light chain

SEQ ID NO: 8020 - protein, 107 aa, Homo sapiens; identical to SEQ ID NO: 8000
  Light chain

SEQ ID NO: 8021 - protein, 107 aa, Homo sapiens; identical to SEQ ID NO: 8017
  Light chain

SEQ ID NO: 8022 - protein, 107 aa, Homo sapiens
  Light chain
DIQMTQSPSSLSASVGDRVTITCRASQGISSYLNWYQQKPGKAPKLLIYAASSLQSGVPSRFSGSGSGTDFTLTISSLQPEDFATYYCQQSYSYPYTFGQGTKLEIK

SEQ ID NO: 8023 - protein, 107 aa, Homo sapiens; identical to SEQ ID NO: 8000
  Light chain

SEQ ID NO: 8024 - protein, 107 aa, Homo sapiens; identical to SEQ ID NO: 8006
  Light chain

SEQ ID NO: 8025 - protein, 107 aa, Homo sapiens; identical to SEQ ID NO: 8000
  Light chain

SEQ ID NO: 8026 - protein, 107 aa, Homo sapiens; identical to SEQ ID NO: 8008
  Light chain

SEQ ID NO: 8027 - protein, 107 aa, Homo sapiens; identical to SEQ ID NO: 8015
  Light chain

SEQ ID NO: 8028 - protein, 108 aa, Homo sapiens
  Light chain
EIVLTQSPGTLSLSPGERATLSCRASQSVSSSYLAWYQQKPGQAPRLLIYGASSRATGIPDRFSGSGSGTDFTLTISRLEPEDFAVYYCQQYGSSPYTFGQGTKLEIK

SEQ ID NO: 8029 - protein, 107 aa, Homo sapiens; identical to SEQ ID NO: 8000
  Light chain

SEQ ID NO: 8030 - protein, 107 aa, Homo sapiens
  Light chain
AIQMTQSPSSLSASVGDRVTITCRASQDIRNDLGWYQQKPGKAPKLLIYAASSLQSGVPSRFSGSGSGTDFTLTISSLQPEDFATYYCLQDYNYPWTFGQGTKVEIK

SEQ ID NO: 8031 - protein, 107 aa, Homo sapiens; identical to SEQ ID NO: 8013
  Light chain

SEQ ID NO: 8032 - protein, 107 aa, Homo sapiens; identical to SEQ ID NO: 8000
  Light chain

SEQ ID NO: 8033 - protein, 107 aa, Homo sapiens; identical to SEQ ID NO: 8000
  Light chain

SEQ ID NO: 8034 - protein, 107 aa, Homo sapiens; identical to SEQ ID NO: 8008
  Light chain

SEQ ID NO: 8035 - protein, 107 aa, Homo sapiens; identical to SEQ ID NO: 8006
  Light chain

SEQ ID NO: 8036 - protein, 107 aa, Homo sapiens; identical to SEQ ID NO: 8000
  Light chain

SEQ ID NO: 8037 - protein, 107 aa, Homo sapiens; identical to SEQ ID NO: 8000
  Light chain

SEQ ID NO: 8038 - protein, 107 aa, Homo sapiens; identical to SEQ ID NO: 8013
  Light chain

SEQ ID NO: 8039 - protein, 107 aa, Homo sapiens; identical to SEQ ID NO: 8008
  Light chain

SEQ ID NO: 8040 - protein, 108 aa, Homo sapiens
  Light chain
EIVMTQSPATLSLSPGERATLSCRASQSVSSSYLSWYQQKPGQAPRLLIHGASTRATGIPARFSGSGSGTDFTLTISSLQPEDFALYYCQQDYNLPYTFGQGTKLEIK

SEQ ID NO: 8041 - protein, 107 aa, Homo sapiens
  Light chain
DIQMTQSPSSLSASVGDRVTITCRASQGIRNDLGWYQQKPGKAPKRLIYAASSLQSGVPSRFSGSGSGTDFTLTISSLQPEDFATYYCQQSYSNPLTFGGGTKVEIK

SEQ ID NO: 8042 - protein, 107 aa, Homo sapiens; identical to SEQ ID NO: 8000
  Light chain

SEQ ID NO: 8043 - protein, 108 aa, Homo sapiens
  Light chain
EIVMTQSPATLSLSPGERATLSCRASQSVSSSYLSWYQQQPGQAPRLLIFGASTRATGIPARFSGSGSGTDFTLTISSLQPEDFAVYYCQQDYNLPLTFGGGTKLEIK

SEQ ID NO: 8044 - protein, 107 aa, Homo sapiens; identical to SEQ ID NO: 8006
  Light chain

SEQ ID NO: 8045 - protein, 107 aa, Homo sapiens; identical to SEQ ID NO: 8008
  Light chain

SEQ ID NO: 8046 - protein, 107 aa, Homo sapiens; identical to SEQ ID NO: 6
  Light chain

SEQ ID NO: 8047 - protein, 107 aa, Homo sapiens; identical to SEQ ID NO: 6
  Light chain

SEQ ID NO: 8048 - protein, 108 aa, Homo sapiens
  Light chain
EIVLTQSPGTLSLSPGERATLSCRASQSVSSSYLAWYQQKPGQAPRLLIYGASSRATGIPDRFSGSGSGTDFTLTISRLEPEDFAVYYCQQYGSSPWTFGQGTKVEIK

SEQ ID NO: 8049 - protein, 108 aa, Homo sapiens; identical to SEQ ID NO: 3
  Light chain

SEQ ID NO: 8050 - protein, 107 aa, Homo sapiens
  Light chain
DIQMTQSPSSLSASVGDRVTITCQASQDISNYLNWYQQKPGKAPKLLIYDASNLETGVPSRFSGSGSGTDFTFTISSLQPEDIATYYCQQYDNLPITFGQGTRLEIK

SEQ ID NO: 8051 - protein, 108 aa, Homo sapiens; identical to SEQ ID NO: 8048
  Light chain

SEQ ID NO: 8052 - protein, 108 aa, Homo sapiens; identical to SEQ ID NO: 8048
  Light chain

SEQ ID NO: 8053 - protein, 112 aa, Homo sapiens
  Light chain
DIVMTQSPLSLPVTPGEPASISCRSSQSLLHSNGYNYLDWYLQKPGQSPQLLIYLGSNRASGVPDRFSGSGSGTDFTLKISRVEAEDVGVYYCMQALQTPLTFGGGTKVEIK

SEQ ID NO: 8054 - protein, 107 aa, Homo sapiens; identical to SEQ ID NO: 6
  Light chain

SEQ ID NO: 8055 - protein, 108 aa, Homo sapiens; identical to SEQ ID NO: 8048
  Light chain

SEQ ID NO: 8056 - protein, 108 aa, Homo sapiens
  Light chain
EIVLTQSPGTLSLSPGERATLSCRASQSVSSSYLAWYQQKPGQAPRLLIYGASSRATGIPDRFSGSGSGTDFTLTISRLEPEDFVVYYCQQYGRSPWTFGQGTKVEIK

SEQ ID NO: 8057 - protein, 108 aa, Homo sapiens
  Light chain
EIVLTQSPGTLSLSPGERATLSCRASQSISSSYLAWYQQKPGQAPRLLIYGASSRATGIPDRFSGSGSGTDITLTISRLEPEDFAVYYCQQYGNSPWTFGQGTKVEIK

SEQ ID NO: 8058 - protein, 107 aa, Homo sapiens; identical to SEQ ID NO: 6
  Light chain

SEQ ID NO: 8059 - protein, 108 aa, Homo sapiens
  Light chain
EIVLTQSPGTLSLSPGERATLSCRASQSVSSSSLAWYQQKPGQAPRLLIYGASSRATGIPDRFSGSGSGTDFTLTISRLAPEDFAVYYCQQYGTSPWTFGQGTKVEIK

SEQ ID NO: 8060 - protein, 107 aa, Homo sapiens; identical to SEQ ID NO: 6
  Light chain

SEQ ID NO: 8061 - protein, 108 aa, Homo sapiens; identical to SEQ ID NO: 3
  Light chain

SEQ ID NO: 8062 - protein, 108 aa, Homo sapiens; identical to SEQ ID NO: 3
  Light chain

SEQ ID NO: 8063 - protein, 108 aa, Homo sapiens; identical to SEQ ID NO: 3
  Light chain

SEQ ID NO: 8064 - protein, 108 aa, Homo sapiens; identical to SEQ ID NO: 8048
  Light chain

SEQ ID NO: 8065 - protein, 112 aa, Homo sapiens; identical to SEQ ID NO: 8053
  Light chain

SEQ ID NO: 8066 - protein, 108 aa, Homo sapiens; identical to SEQ ID NO: 3
  Light chain

SEQ ID NO: 8067 - protein, 107 aa, Homo sapiens; identical to SEQ ID NO: 6
  Light chain

SEQ ID NO: 8068 - protein, 107 aa, Homo sapiens; identical to SEQ ID NO: 6
  Light chain

SEQ ID NO: 8069 - protein, 107 aa, Homo sapiens
  Light chain
DIQMTQSPSSLSASVGDRVTITCRASQSISSFLNWYQQKPGKAPKLLIYAASSLQSGVPSRFSGSGSGTDFTLTISSLQPEDFAAYYCQQGYSTPFTFGPGTKVDIK

SEQ ID NO: 8070 - protein, 108 aa, Homo sapiens; identical to SEQ ID NO: 8048
  Light chain

SEQ ID NO: 8071 - protein, 107 aa, Homo sapiens
  Light chain
DIQMTQSPSSLSASVGDRVTITCRASQSISSFLNWYQQKPGKAPKLLIYAASSLQSGVPSRFSGSGSGTDFTLTISSLQPEDFAAYYCQQSYSTPFAFGPGTKVDIK

SEQ ID NO: 8072 - protein, 107 aa, Homo sapiens; identical to SEQ ID NO: 6
  Light chain

SEQ ID NO: 8073 - protein, 108 aa, Homo sapiens; identical to SEQ ID NO: 3
  Light chain

SEQ ID NO: 8074 - protein, 107 aa, Homo sapiens; identical to SEQ ID NO: 6
  Light chain

SEQ ID NO: 8075 - protein, 108 aa, Homo sapiens; identical to SEQ ID NO: 8048
  Light chain

SEQ ID NO: 8076 - protein, 107 aa, Homo sapiens; identical to SEQ ID NO: 6
  Light chain

SEQ ID NO: 8077 - protein, 108 aa, Homo sapiens; identical to SEQ ID NO: 8048
  Light chain

SEQ ID NO: 8078 - protein, 108 aa, Homo sapiens; identical to SEQ ID NO: 8048
  Light chain

SEQ ID NO: 8079 - protein, 107 aa, Homo sapiens; identical to SEQ ID NO: 6
  Light chain

SEQ ID NO: 8080 - protein, 107 aa, Homo sapiens; identical to SEQ ID NO: 6
  Light chain

SEQ ID NO: 8081 - protein, 108 aa, Homo sapiens
  Light chain
EIVLTQSPGTLSLSPGERATLSCRASQSVSSSYLAWYQQKPGQAPRLLIYGASSRATGIPDRFSGSGSGTDFTLTISRLEPADFAVYHCQQFGSSPWTFGQGTKVEIK

SEQ ID NO: 8082 - protein, 107 aa, Homo sapiens
  Light chain
DIQMTQSPSFLSASVGDRVTITCRASQGISSYLAWYQQKPGKAPKLLIYAASTLQSGVPSRFSGSGSGTEFTLTISSLQPEDFATYYCQQLNSYPRTLGQGTKVEIK

SEQ ID NO: 8083 - protein, 112 aa, Homo sapiens; identical to SEQ ID NO: 8053
  Light chain

SEQ ID NO: 8084 - protein, 108 aa, Homo sapiens; identical to SEQ ID NO: 12
  Light chain

SEQ ID NO: 8085 - protein, 108 aa, Homo sapiens
  Light chain
EIVLTQSPGTLSLSPGERATLSCRASQSVSSSYLAWYQQKPGQAPRLLIYGASRRATGIPDRFSGSGSGTDFILTISRLEPEDFAVYYCQQYGTSPFTFGPGTRVDIK

SEQ ID NO: 8086 - protein, 108 aa, Homo sapiens
  Light chain
EIVLTQSPGTLSLSPGERATLSCRASQRAGSSYLAWYQQKSGQAPRLLIYGASSRATGIPDRFSGSGSGTDFTLTISRLEPEDFAVYYCQQYGNSPWTFGQGTKVEIK

SEQ ID NO: 8087 - protein, 107 aa, Homo sapiens
  Light chain
DIQMTQSPSSLSASVGDRVTITCRASQGIRNDLGWYQQKPGKAPKRLIYAASSLQSGVPSRFSGSGSGTDFTLTISSLQPEDFATYYCQQSYSTPYTFGQGTKLEIK

SEQ ID NO: 8088 - protein, 107 aa, Homo sapiens; identical to SEQ ID NO: 8008
  Light chain

SEQ ID NO: 8089 - protein, 112 aa, Homo sapiens; identical to SEQ ID NO: 8053
  Light chain

SEQ ID NO: 8090 - protein, 108 aa, Homo sapiens; identical to SEQ ID NO: 3
  Light chain

SEQ ID NO: 8091 - protein, 107 aa, Homo sapiens
  Light chain
DIQMTQSPSSLSASVGDRVTITCRASQGIRNDLGWYQQKPGKAPKRLIYAASSLQSGVPSRFSGSGSGTEFTLTISSLQPEDFATYYCLQHNSYPRTFGQGTKVEIK

SEQ ID NO: 8092 - protein, 107 aa, Homo sapiens; identical to SEQ ID NO: 8008
  Light chain

SEQ ID NO: 8093 - protein, 108 aa, Homo sapiens; identical to SEQ ID NO: 8086
  Light chain

SEQ ID NO: 8094 - protein, 107 aa, Homo sapiens
  Light chain
AIQMTQSPSSLSASVGDRVTITCRASQGIRNDLGWYQQKPGKAPKLLIYAASSLQSGVPSRFSGSGSGTDFTLTISSLQPEDFATYYCLQDYNYPRTFGQGTKVEIK

SEQ ID NO: 8095 - protein, 107 aa, Homo sapiens
  Light chain
AIQMTQSPSSLSASVGDRVTITCRASQGIRNDLGWYQQKPGKVPKLLIYAASSLQSGVPSRFSGSGSGTDFTLTISSLQPEDFATYYCLQDYNYPYTFGQGTKLEIK

SEQ ID NO: 8096 - protein, 107 aa, Homo sapiens; identical to SEQ ID NO: 8082
  Light chain

SEQ ID NO: 8097 - protein, 107 aa, Homo sapiens; identical to SEQ ID NO: 6
  Light chain

SEQ ID NO: 8098 - protein, 107 aa, Homo sapiens; identical to SEQ ID NO: 8094
  Light chain

SEQ ID NO: 8099 - protein, 112 aa, Homo sapiens; identical to SEQ ID NO: 8053
  Light chain

SEQ ID NO: 8100 - protein, 107 aa, Homo sapiens; identical to SEQ ID NO: 8008
  Light chain

SEQ ID NO: 8101 - protein, 107 aa, Homo sapiens
  Light chain
DIQMTQSPSSLSASVGDRVTITCRASQGIRNDLGWYQQKPGKAPKRLIYAASSLQSGVPSRFSGSGSGTEFTLTISSLQPEDFATYYCLQLNSYPRTFGQGTKVEIK

SEQ ID NO: 8102 - protein, 107 aa, Homo sapiens
  Light chain
AIQMTQSPSSLSASVGDRVTITCRASQGIRNDLGWYQQKPGKAPKLLIYAASSLQSGVPSRFSGSGSGTDFTLTISSLQPEDFATYYCLQNYNYPRTFGQGTKVEIN

SEQ ID NO: 8103 - protein, 108 aa, Homo sapiens
  Light chain
EIVMTQSPATLSLSPGERATLSCRASQSVSSSYLSWYQQRPGQAPRLLIYGASTRATGIPARFSGSGSGTDFTLTISSLQPEDFAVYYCQQDYNLPYTFGQGTKLEIK

SEQ ID NO: 8104 - protein, 107 aa, Homo sapiens; identical to SEQ ID NO: 8087
  Light chain

SEQ ID NO: 8105 - protein, 107 aa, Homo sapiens; identical to SEQ ID NO: 8082
  Light chain

SEQ ID NO: 8106 - protein, 107 aa, Homo sapiens; identical to SEQ ID NO: 8008
  Light chain

SEQ ID NO: 8107 - protein, 107 aa, Homo sapiens
  Light chain
DIQLTQSPSFLSASVGDRVTITCRASQGIRSYLAWYQQKPGKAPKLLIYAASTLQSGVPSRFSGSGSGTDFTLTISSLQPEDFATYYCQQYNSYPYTFGQGTKLEIK

SEQ ID NO: 8108 - protein, 107 aa, Homo sapiens
  Light chain
DIQMTQSPSSLSASVGDRVTITCRASQGIRNDLGWYQQKPGKAPKRLIYAASSLQSGVPSRFSGSGSGTEFTLTISSLQPEDFATYYCLQDYNYPWTFGQGTKVEIK

SEQ ID NO: 8109 - protein, 107 aa, Homo sapiens
  Light chain
DIQMTQSPSLLSASVGDRVTITCRASQGIRNDLGWYQQKPGKAPKRLIYAASSLQSGVPSRFSGSGSGTDFTLTISSLQPEDFATYYCQQYNSYPRTFGQGTKVEIK

SEQ ID NO: 8110 - protein, 107 aa, Homo sapiens; identical to SEQ ID NO: 6
  Light chain

SEQ ID NO: 8111 - protein, 108 aa, Homo sapiens
  Light chain
EIVLTQSPGTLSLSPGERATLSCRASQSVSSSYLAWYQQKPGQAPRLLIYGASSRATGIPDRFSGSGSGTDFTLTISRLEPEDFAVYYCQQYGSSPLTFGGGTKVEIK

SEQ ID NO: 8112 - protein, 107 aa, Homo sapiens
  Light chain
DIQMTQSPSSLSASVGDRVTITCRASQSISSYLNWYQQKPGKAPKLLIYAASSLQSGVPSRFSGSGSGTDFTLTISSLQPEDFATYYCLQHNSYPYTFGQGTKLEIK

SEQ ID NO: 8113 - protein, 107 aa, Homo sapiens; identical to SEQ ID NO: 6
  Light chain

SEQ ID NO: 8114 - protein, 107 aa, Homo sapiens; identical to SEQ ID NO: 6
  Light chain

SEQ ID NO: 8115 - protein, 107 aa, Homo sapiens; identical to SEQ ID NO: 8101
  Light chain

SEQ ID NO: 8116 - protein, 107 aa, Homo sapiens; identical to SEQ ID NO: 8108
  Light chain

SEQ ID NO: 8117 - protein, 107 aa, Homo sapiens; identical to SEQ ID NO: 8091
  Light chain

SEQ ID NO: 8118 - protein, 107 aa, Homo sapiens
  Light chain
DIQMTQSPSSLSASVGDRVTITCRASQSISSYLNWYQQKPGKAPKLLIYAASSLQSGVPSRFSGSGSGTDFTLTISSLQPEDFATYYCKQSYSTPYTFGQGTKLEIK

SEQ ID NO: 8119 - protein, 108 aa, Homo sapiens; identical to SEQ ID NO: 8086
  Light chain

SEQ ID NO: 8120 - protein, 107 aa, Homo sapiens
  Light chain
DIQMTQSPSSLSASVGDRVTITCRASQGIRNDLGWYQQKPGKAPKRLIYAASSLQSGVPSRFSGSGSGTEFTLTISSLQPEDFATYYCLQRNSYPWTFGQGTKVEIK

SEQ ID NO: 8121 - protein, 108 aa, Homo sapiens; identical to SEQ ID NO: 8081
  Light chain

SEQ ID NO: 8122 - protein, 107 aa, Homo sapiens; identical to SEQ ID NO: 8008
  Light chain

SEQ ID NO: 8123 - protein, 107 aa, Homo sapiens
  Light chain
DIQLTQSPSFLSASVGDRVTITCRASQGISSYLAWYQQKPGKAPKLLIYAASTLQSGVPSRFSGSGSGTEFTLTISSLQPEDFATYYCRQLNSYPWTFGQGTKVEIK

SEQ ID NO: 8124 - protein, 107 aa, Homo sapiens; identical to SEQ ID NO: 8109
  Light chain

SEQ ID NO: 8125 - protein, 107 aa, Homo sapiens
  Light chain
DIQMTQSPSSLSASVGDRVTITCRASQGIRNDLGWYQQKPGKAPKRLIYAASSLQSGVPSRFSGSGSGTEFTLTISSLQPEDFATYYCQQLNSYPWTFGQGTKVEIK

SEQ ID NO: 8126 - protein, 107 aa, Homo sapiens
  Light chain
DIQLTQSPSFLSASVGDRVTITCRASQGISSYLAWYQQKPGKAPKLLIYAASTLQSGVPSRFSGSGSGTEFTLTISSLQPEDFATYYCKQLNSYPRTFGQGTKVEIK

SEQ ID NO: 8127 - protein, 108 aa, Homo sapiens; identical to SEQ ID NO: 8081
  Light chain

SEQ ID NO: 8128 - protein, 107 aa, Homo sapiens; identical to SEQ ID NO: 8082
  Light chain

SEQ ID NO: 8129 - protein, 112 aa, Homo sapiens; identical to SEQ ID NO: 8053
  Light chain

SEQ ID NO: 8130 - protein, 107 aa, Homo sapiens; identical to SEQ ID NO: 8087
  Light chain

SEQ ID NO: 8131 - protein, 108 aa, Homo sapiens
  Light chain
EIVLTQSPGTLSLSPGERATLSCRASQSVSSSYLAWYQQKPGQAPRLLIYGASSRATGIPDRFSGSGSGTDCTLAISRLEPEDFAVYYCQQYGSSPWTFGQGTKVEIK

SEQ ID NO: 8132 - protein, 107 aa, Homo sapiens
  Light chain
DIQMTQSPSSLSASVGDRVTITCRASQGISNDLAWFQQKPGKAPKSLIYGASSLQSGVPSKFSGSGSGTDFTLTISSLQPEDFATYYCQQYNSYPYTFGQGTKLEIK

SEQ ID NO: 8133 - protein, 107 aa, Homo sapiens
  Light chain
DIQMTQSPSSLSASVGDRVTITCRASQDITNDLAWFQQKPGKAPKSLIYDASSLQSGVPSKFSGSGSGTDFTLTISSLQPEDFATYYCQQYKSYPYTFGLGTKLEIK

SEQ ID NO: 8134 - protein, 108 aa, Homo sapiens
  Light chain
EIVLTQSPGTLSLSPGERAILSCRASQSVSSNYLAWYQQKPGQAPRLLIYGASSRATGIPDRFSGSGSGTDFTLTISRLEPEDFAVYYCQQYGNSPFTFGPGTKVDIK

SEQ ID NO: 8135 - protein, 107 aa, Homo sapiens; identical to SEQ ID NO: 8133
  Light chain

SEQ ID NO: 8136 - protein, 108 aa, Homo sapiens
  Light chain
EIVLTQSPGTLSLSPGERATLSCRASQSVSSNYLAWYQQKPGQAPRLLIYGASSRATGIPDRFSGSGSGTDFTLTISRLEPEDFAVYYCQQYGSSPFTFGPGTKVDIK

SEQ ID NO: 8137 - protein, 108 aa, Homo sapiens; identical to SEQ ID NO: 8131
  Light chain

SEQ ID NO: 8138 - protein, 108 aa, Homo sapiens; identical to SEQ ID NO: 2
  Light chain

SEQ ID NO: 8139 - protein, 108 aa, Homo sapiens; identical to SEQ ID NO: 2
  Light chain

SEQ ID NO: 8140 - protein, 107 aa, Homo sapiens
  Light chain
DIQLTQSPSSLSASVGDRVTITCRVSQDISRLLNWYRQKPGEIPKLLIYRASSLQSGVPSRFSGSGSGTDFTLTISSLQPEDIATYYCQRTYSAPYTFGQGTKLEIK

SEQ ID NO: 8141 - protein, 107 aa, Homo sapiens
  Light chain
DIQLTQSPSFLSASVGDRVTITCRASQGINNYLAWYQQKPGKAPKLLIYAASTLQSGVPSRFSGTGSGTEFTLTISSLQPEDFATYSCQQLNNYPYTFGQGTKLEIT

SEQ ID NO: 8142 - protein, 108 aa, Homo sapiens; identical to SEQ ID NO: 8136
  Light chain

SEQ ID NO: 8143 - protein, 107 aa, Homo sapiens
  Light chain
DIQLTQSPSSLSASVGDRVTITCRVSQDISSFLNWYRQKPGDVPELLIYRSSNFQSGVPSRFSGSGSGTDFTLTISSLQPEDVATYYCQRTYNAPYTFGQGTKLEIK

SEQ ID NO: 8144 - protein, 108 aa, Homo sapiens
  Light chain
EIVLTQSPGTLSLSPGERATLSCRASQSVSSSYLAWYQQKPGQAPRLLIYGASSRATGIPDRFSGSGSGTDFTLTISRLEPEDFAVYYCQQFGSSPWTFGQGTKVEIK

SEQ ID NO: 8145 - protein, 108 aa, Homo sapiens; identical to SEQ ID NO: 8136
  Light chain

SEQ ID NO: 8146 - protein, 108 aa, Homo sapiens; identical to SEQ ID NO: 8136
  Light chain

SEQ ID NO: 8147 - protein, 108 aa, Homo sapiens; identical to SEQ ID NO: 8131
  Light chain

SEQ ID NO: 8148 - protein, 107 aa, Homo sapiens
  Light chain
EIVLTQSPDFQSVTPKEKVTITCRASQSIGSSLHWYQQKPDQSPKLLIKYASQSFSGVPSRFSGSGSGTDFTLTINSLEAEDAATYYCHQSSSLPFTFGPGTKVDIK

SEQ ID NO: 8149 - protein, 106 aa, Homo sapiens
  Light chain
EIVLTQSPDTLSLSPGERATLSCRASQSTNYLAWYQQKPGQAPRLLIYGASSRATGIPDRFSGSGSGTDFTLTISGLQPEDFAVYYCQQYGTSPWTFGQGTKVEIK

SEQ ID NO: 8150 - protein, 107 aa, Homo sapiens; identical to SEQ ID NO: 8148
  Light chain

SEQ ID NO: 8151 - protein, 108 aa, Homo sapiens
  Light chain
EIVMTQSPATLSLSPGERATLSCRASQSVSSSYLSWYQQKPGQAPRLLIHGASTRATGIPARFSGSGSGTDFTLTISSLQPEDFAVYYCQQDYNLPFTFGPGTKVDIK

SEQ ID NO: 8152 - protein, 108 aa, Homo sapiens
  Light chain
EIVLTQSPGTLSLSPGERATLSCRASQSISSSYLAWYQQKPGQAPRLLIYGASSRATGIPDRFSGSGSGTDFTLTISRLEPEDFAVYYCQQFGSSPFTFGPGTKVDIK

SEQ ID NO: 8153 - protein, 107 aa, Homo sapiens; identical to SEQ ID NO: 8133
  Light chain

SEQ ID NO: 8154 - protein, 107 aa, Homo sapiens; identical to SEQ ID NO: 8133
  Light chain

SEQ ID NO: 8155 - protein, 107 aa, Homo sapiens
  Light chain
DIQMTQSPSSLSASVGDRVTITCRASQDISNDLAWYQQKPGKVPKLLIYAASTLQSGVPSRFSGSGSGTDFTLTISSLQPKDVATYYCQKYDSAPFTFGQGTKLDIR

SEQ ID NO: 8156 - protein, 107 aa, Homo sapiens; identical to SEQ ID NO: 8141
  Light chain

SEQ ID NO: 8157 - protein, 108 aa, Homo sapiens; identical to SEQ ID NO: 8131
  Light chain

SEQ ID NO: 8158 - protein, 107 aa, Homo sapiens
  Light chain
DIQLTQSPSFLSAYVGDRVTITCRASQGISSFLAWYQQKPGKAPNLLIYAASTLQSGVPSRFSGTGSGTEFTLTISSLQPEDFATYYCQQLNNYPSTFGQGTKLEIK

SEQ ID NO: 8159 - protein, 107 aa, Homo sapiens; identical to SEQ ID NO: 8133
  Light chain

SEQ ID NO: 8160 - protein, 107 aa, Homo sapiens
  Light chain
DIQLTQSPSFLSASVGDRVTITCRASQGISSYLAWYQQKPGKAPKLLIYAASTLQSGVPSRFSGTGSGTEFTLTISSLQPEDFATYYCQQLNNYPCTFGQGTKLEIK

SEQ ID NO: 8161 - protein, 108 aa, Homo sapiens; identical to SEQ ID NO: 8131
  Light chain

SEQ ID NO: 8162 - protein, 107 aa, Homo sapiens; identical to SEQ ID NO: 8141
  Light chain

SEQ ID NO: 8163 - protein, 108 aa, Homo sapiens
  Light chain
EIVLTQSPGTLSLSPGERATLSCRASQSISSSYLAWYQQKPGQAPRLLIYGASSRATGIPDRFSGSGSGTDFTLTISRLEPEDFAVYYCQQFGRSPFTFGPGTKVDIK

SEQ ID NO: 8164 - protein, 108 aa, Homo sapiens; identical to SEQ ID NO: 8131
  Light chain

SEQ ID NO: 8165 - protein, 108 aa, Homo sapiens
  Light chain
EIVLTQSPGTLSLSPGERATLSCRASQSVSSSYLAWYQQKPGQAPRLLIYGASSRATGIPDRFSGSGSGTDFTLTISRLEPEDFAVYYCQQYGTSPFTFGHGTKVDIK

SEQ ID NO: 8166 - protein, 108 aa, Homo sapiens; identical to SEQ ID NO: 8136
  Light chain

SEQ ID NO: 8167 - protein, 108 aa, Homo sapiens; identical to SEQ ID NO: 2
  Light chain

SEQ ID NO: 8168 - protein, 107 aa, Homo sapiens; identical to SEQ ID NO: 8133
  Light chain

SEQ ID NO: 8169 - protein, 108 aa, Homo sapiens
  Light chain
EIVLTQSPGTLSLSPGERATLSCRASQSVSSSYLAWYQQKPGQAPRLLIYGASSRATGIPDRFSGSGSGTDFTLTISRLEPEDFAVYYCQQYSRSPWTFGQGTKVEIK

SEQ ID NO: 8170 - protein, 107 aa, Homo sapiens
  Light chain
DIQMTQSPSSLSASVGDRVTITCRASQGIGNDLAWFQQKPGKAPKSLIYGASSLQSGVPSKFSGSGSGTDFTLTISSLQPEDLATYYCQQYKTYPYTFGRGTKLEIK

SEQ ID NO: 8171 - protein, 108 aa, Homo sapiens; identical to SEQ ID NO: 8131
  Light chain

SEQ ID NO: 8172 - protein, 108 aa, Homo sapiens; identical to SEQ ID NO: 8152
  Light chain

SEQ ID NO: 8173 - protein, 108 aa, Homo sapiens; identical to SEQ ID NO: 8136
  Light chain

SEQ ID NO: 8174 - protein, 108 aa, Homo sapiens; identical to SEQ ID NO: 8131
  Light chain

SEQ ID NO: 8175 - protein, 108 aa, Homo sapiens
  Light chain
EIVLTQSPGTLSLSPGERATLSCRASQSVSSSYLAWYQQKPGQAPRLLIYGASSRATGIPDRFSGSGSGTDFTLTINRLEPEDFAVYYCQQYGRSPWTFGQGTKVEIK

SEQ ID NO: 8176 - protein, 107 aa, Homo sapiens; identical to SEQ ID NO: 8132
  Light chain

SEQ ID NO: 8177 - protein, 108 aa, Homo sapiens; identical to SEQ ID NO: 8136
  Light chain

SEQ ID NO: 8178 - protein, 108 aa, Homo sapiens
  Light chain
EIVLTQSPGTLSLSPGERATLSCRASPSISSSYLAWYQQKPGQAPRLLIYGASSRATGIPDRFSGSGSGTDFTLTISRLEPEDFAVYYCHQYGSSPFTFGPGTKVDIK

SEQ ID NO: 8179 - protein, 108 aa, Homo sapiens; identical to SEQ ID NO: 8131
  Light chain

SEQ ID NO: 8180 - protein, 107 aa, Homo sapiens; identical to SEQ ID NO: 8133
  Light chain

SEQ ID NO: 8181 - protein, 107 aa, Homo sapiens; identical to SEQ ID NO: 8132
  Light chain

SEQ ID NO: 8182 - protein, 108 aa, Homo sapiens; identical to SEQ ID NO: 3
  Light chain

SEQ ID NO: 8183 - protein, 107 aa, Homo sapiens
  Light chain
EIVLTQSPDFQSVTPKEKVTITCRASQNIGSSLHWYQQKPDQSPKLLIKYASQSFSGVPSRFSGSGSGTDFTLTINSLEAEDAATYYCHQSSSLPFTFGPGTKVDIK

SEQ ID NO: 8184 - protein, 107 aa, Homo sapiens
  Light chain
DIQMTQSPSSLSASVGDRVTITCRASQDISNDLAWYQQKPGKVPKLLIYAASTLQSGVPSRFSGSGSGTDFTLTISSLQPEDVATYYCQKYDSAPFTFGQGTKLDIR

SEQ ID NO: 8185 - protein, 107 aa, Homo sapiens; identical to SEQ ID NO: 8140
  Light chain

SEQ ID NO: 8186 - protein, 107 aa, Homo sapiens; identical to SEQ ID NO: 8140
  Light chain

SEQ ID NO: 8187 - protein, 108 aa, Homo sapiens; identical to SEQ ID NO: 8048
  Light chain

SEQ ID NO: 8188 - protein, 108 aa, Homo sapiens; identical to SEQ ID NO: 3
  Light chain

SEQ ID NO: 8189 - protein, 108 aa, Homo sapiens
  Light chain
EIVLTQSPGTLSLSPGERATLSCRASQSVSSNFLAWYQQKPGQAPRLLIYGASSRATGIPDRFSGSGSGTDFTLTISRLEPEDFAVYYCQQYGTSPWTFGQGTKVEIK

SEQ ID NO: 8190 - protein, 107 aa, Homo sapiens
  Light chain
DIQMTQSPSSLAASVGDRVTITCRASQGISNDLAWFQQKPGKAPKSLIYAASSLQSGVPSKFSGSGSGTDFTLSISSLQPEDFATYYCQQYKNYPYTFGQGTKLEIK

SEQ ID NO: 8191 - protein, 107 aa, Homo sapiens; identical to SEQ ID NO: 8143
  Light chain

SEQ ID NO: 8192 - protein, 107 aa, Homo sapiens; identical to SEQ ID NO: 8133
  Light chain

SEQ ID NO: 8193 - protein, 108 aa, Homo sapiens; identical to SEQ ID NO: 3
  Light chain

SEQ ID NO: 8194 - protein, 107 aa, Homo sapiens; identical to SEQ ID NO: 8140
  Light chain

SEQ ID NO: 8195 - protein, 107 aa, Homo sapiens
  Light chain
DIQLTQSPSFLSASVGDRVTITCRASQGISSFLAWYQQKPGKAPNLLIYAASTLHSGVPSRFGGTGSGTEFTLTISSLQPEDFATYYCQQLNNYPYTFGQGTKLEIK

SEQ ID NO: 8196 - protein, 108 aa, Homo sapiens; identical to SEQ ID NO: 8048
  Light chain

SEQ ID NO: 8197 - protein, 108 aa, Homo sapiens; identical to SEQ ID NO: 8048
  Light chain

SEQ ID NO: 8198 - protein, 107 aa, Homo sapiens; identical to SEQ ID NO: 8133
  Light chain

SEQ ID NO: 8199 - protein, 107 aa, Homo sapiens; identical to SEQ ID NO: 8132
  Light chain

SEQ ID NO: 8200 - protein, 108 aa, Homo sapiens; identical to SEQ ID NO: 8048
  Light chain

SEQ ID NO: 8201 - protein, 108 aa, Homo sapiens; identical to SEQ ID NO: 3
  Light chain

SEQ ID NO: 8202 - protein, 107 aa, Homo sapiens
  Light chain
DIQMTQSPSSLSASVGDRVTITCRASQGINNDLAWFQQKPGKAPKSLIYETSSLQSGVPSKFSGSGSGTDFTLTISSLQPEDFATYYCQQYKTYPYTFGQGTKLEIK

SEQ ID NO: 8203 - protein, 108 aa, Homo sapiens; identical to SEQ ID NO: 2
  Light chain

SEQ ID NO: 8204 - protein, 107 aa, Homo sapiens; identical to SEQ ID NO: 8140
  Light chain

SEQ ID NO: 8205 - protein, 108 aa, Homo sapiens; identical to SEQ ID NO: 8048
  Light chain

SEQ ID NO: 8206 - protein, 108 aa, Homo sapiens; identical to SEQ ID NO: 2
  Light chain

SEQ ID NO: 8207 - protein, 108 aa, Homo sapiens
  Light chain
EIVLTQSPGTLSLSPGERATLSCRASQSVSSNYLAWYQQKPGQAPRLLIYGASSRATGIPDRFSGSGSGTDFTLTISRLEPEDFAVYYCLRYGTSPFTFGPGTKVDIK

SEQ ID NO: 8208 - protein, 108 aa, Homo sapiens; identical to SEQ ID NO: 8151
  Light chain

SEQ ID NO: 8209 - protein, 107 aa, Homo sapiens
  Light chain
DIQMTQSPSSLSASVGDRVTITCRASQDITNDLAWFQQKPGKAPKSLIYDASSLQSGVPSKFSGSGSGTDFTLTISSLQPEDFATYYCQQYRSYPYTFGLGTKLEIK

SEQ ID NO: 8210 - protein, 108 aa, Homo sapiens; identical to SEQ ID NO: 8169
  Light chain

SEQ ID NO: 8211 - protein, 108 aa, Homo sapiens; identical to SEQ ID NO: 3
  Light chain

SEQ ID NO: 8212 - protein, 108 aa, Homo sapiens; identical to SEQ ID NO: 8189
  Light chain

SEQ ID NO: 8213 - protein, 107 aa, Homo sapiens
  Light chain
DIQMTQSPSSLSASVGDRVTITCRASQGISNDLAWFQQKPGKAPKSLIYDASSLQSGVPSKFSGSGSGTDFTLTISSLQPEDFATYYCQQYKSYPYTFGQGTKLEIK

SEQ ID NO: 8214 - protein, 107 aa, Homo sapiens; identical to SEQ ID NO: 8213
  Light chain

SEQ ID NO: 8215 - protein, 107 aa, Homo sapiens
  Light chain
DIQLTQSPSSLSASVGDRVTITCRVSQDISRLLNWYRQKPGEIPKLLIYRASSLQSGVPSRFSGSGSGTDFTLTITSLQPEDLATYYCQRTYSAPYTFGQGTKLEIK

SEQ ID NO: 8216 - protein, 108 aa, Homo sapiens
  Light chain
EIVLTQSPGTLSLSPGERATLSCRASQSVSGSYLAWYQQKPGQAPRLLIYGASSRATGIPDRFSGSGSGTDFTLTISRLEPEDFAVYYCQQYGSSPFTFGPGTKVDIK

SEQ ID NO: 8217 - protein, 107 aa, Homo sapiens
  Light chain
DIQLTQSPSFLSASVGDRVTITCRASQGISSYLAWYQQKPGKAPKLLIYAASTLQSGVPSRFSGTGSGTEFTLTISSLQPEDFATYYCQQLNNYPYTFGQGTKLEIK

SEQ ID NO: 8218 - protein, 108 aa, Homo sapiens
  Light chain
EIVLTQSPGTLSLSPGERATLSCRASQSVSSSYLAWYQQRPGQAPRLLIYGASSRATGIPDRFSGSGSGTDFTLTISRLEPEDFAVYYCQQYGRSPWTFGQGTKVEIK

SEQ ID NO: 8219 - protein, 108 aa, Homo sapiens; identical to SEQ ID NO: 8048
  Light chain

SEQ ID NO: 8220 - protein, 108 aa, Homo sapiens
  Light chain
EIVLTQSPGTLSLSPGERATLSCRASQSVSSSYLAWYQQKPGQAPRLLIYGASSRATDIPDRFSGSGSGTDFTLTISRLEPEDFAVYYCQQFGSSPFTFGPGTKVDIK

SEQ ID NO: 8221 - protein, 107 aa, Homo sapiens; identical to SEQ ID NO: 8132
  Light chain

SEQ ID NO: 8222 - protein, 107 aa, Homo sapiens; identical to SEQ ID NO: 8132
  Light chain

SEQ ID NO: 8223 - protein, 107 aa, Homo sapiens; identical to SEQ ID NO: 8190
  Light chain

SEQ ID NO: 8224 - protein, 107 aa, Homo sapiens; identical to SEQ ID NO: 8132
  Light chain

SEQ ID NO: 8225 - protein, 108 aa, Homo sapiens
  Light chain
EIVMTQSPATLSLSPGERATLSCRASQSVSSSYLSWYQQKPGQAPRLLIYGASTRATGIPARFSGSGSGTDFTLTISSLQPEDFAVYYCLQDYNLPFTFGPGTKVDIK

SEQ ID NO: 8226 - protein, 107 aa, Homo sapiens
  Light chain
DIQMTQSPSSLSASVGDRVTITCRASQGISNDLAWFQQKPGKAPKSLIYDASSLQSGVPSKFSGSGSGTDFTLTISSLQPEDFATYYCQQYKSYPFTFGQGTKLEIK

SEQ ID NO: 8227 - protein, 107 aa, Homo sapiens; identical to SEQ ID NO: 8132
  Light chain

SEQ ID NO: 8228 - protein, 107 aa, Homo sapiens; identical to SEQ ID NO: 8213
  Light chain

SEQ ID NO: 8229 - protein, 107 aa, Homo sapiens; identical to SEQ ID NO: 8213
  Light chain

SEQ ID NO: 8230 - protein, 107 aa, Homo sapiens
  Light chain
DIQMTQSPSSLSASLGDRVTITCRASQDISNDLAWFQQKPGKAPKSLIYETSSLQSGVPSKFSGSGSGTDFTLTISSLQPEDFASYYCQQYRSYPYTFGQGTKLEIK

SEQ ID NO: 8231 - protein, 107 aa, Homo sapiens; identical to SEQ ID NO: 8217
  Light chain

SEQ ID NO: 8232 - protein, 107 aa, Homo sapiens; identical to SEQ ID NO: 8213
  Light chain

SEQ ID NO: 8233 - protein, 108 aa, Homo sapiens; identical to SEQ ID NO: 8151
  Light chain

SEQ ID NO: 8234 - protein, 107 aa, Homo sapiens; identical to SEQ ID NO: 8213
  Light chain

SEQ ID NO: 8235 - protein, 108 aa, Homo sapiens; identical to SEQ ID NO: 8218
  Light chain

SEQ ID NO: 8236 - protein, 108 aa, Homo sapiens; identical to SEQ ID NO: 8151
  Light chain

SEQ ID NO: 8237 - protein, 107 aa, Homo sapiens; identical to SEQ ID NO: 8213
  Light chain

SEQ ID NO: 8238 - protein, 108 aa, Homo sapiens; identical to SEQ ID NO: 8048
  Light chain

SEQ ID NO: 8239 - protein, 108 aa, Homo sapiens
  Light chain
EIVLTQSPGTLSLSPGERATLSCRASQSVSSSYLAWYQQKPGQAPRLLIYGASSRATGIPDRFSGSGSGTDFTLTISRLEPEDFAVYYCQQYGISPFTFGPGTKVDIK

SEQ ID NO: 8240 - protein, 108 aa, Homo sapiens; identical to SEQ ID NO: 8144
  Light chain

SEQ ID NO: 8241 - protein, 108 aa, Homo sapiens
  Light chain
EIVLTQSPGTLSLSPGERATLSCRASQSGSSSYLAWYQQKPGQAPRLLIYGASSRATGIPDRFSGSGSGTDFTLTISRLEPEDFAVYYCQQYGSSPFTFGPGTKVDIK

SEQ ID NO: 8242 - protein, 108 aa, Homo sapiens; identical to SEQ ID NO: 8048
  Light chain

SEQ ID NO: 8243 - protein, 108 aa, Homo sapiens; identical to SEQ ID NO: 8241
  Light chain

SEQ ID NO: 8244 - protein, 108 aa, Homo sapiens
  Light chain
EIVLTQSPGTLSLSPGERATLSCRASQSVSSSYLAWYQQKPGQAPRLLIYGASSRATGIPDRFSGSGSGTDFTLTISRLEPEDFAVYYCQQYGNSPFTFGPGTKVDIK

SEQ ID NO: 8245 - protein, 112 aa, Homo sapiens
  Light chain
DIVMTQSPLSLPVTPGEPASISCRSSQSLLHSNGYNYLDWYLQKPGQSPQLLIYLGSNRASGVPDRFSGSGSGTDFTLKISRVEAEDVGVYYCMQSLQTPPTFGQGTKVEIK

SEQ ID NO: 8246 - protein, 108 aa, Homo sapiens
  Light chain
EIVLTQSPGTLSLSPGERATLSCRASQSDSSSYLAWYQQKPGQAPRPLIYGASSRATGIPDRFSGSGSGTDFTLTISRLEPEDFAVYYCQQYGRSPWTFGQGTKVEIK

SEQ ID NO: 8247 - protein, 107 aa, Homo sapiens
  Light chain
DIQMTQSPSSLSASVGDRVTITCRASQSISSYLSWYQRKPGKAPKLLIYAASSLQSGVPSRFSGSGSGTDFTLTISSLQPEDFATYYCQQSYSIPLTFGGGTKVEIK

SEQ ID NO: 8248 - protein, 112 aa, Homo sapiens; identical to SEQ ID NO: 8245
  Light chain

SEQ ID NO: 8249 - protein, 107 aa, Homo sapiens
  Light chain
EIVLTQSPDFQSVTPKEKVTITCRASQSIGSSLHWYQQKPDQSPKLLIKYASQSISGVPSRFSGSGSGTDFTLTINSLEAEDAAAYYCHQSSSLPFTFGPGTKVDIK

SEQ ID NO: 8250 - protein, 108 aa, Homo sapiens; identical to SEQ ID NO: 8239
  Light chain

SEQ ID NO: 8251 - protein, 107 aa, Homo sapiens
  Light chain
DIQMTQSPSSLSASVGDRVTITCRASQGISNYLAWFQQKPGKAPKSLIYAASSLQSGVPSKFSGSGSGTDFTLTISSLQPEDFATYYCQLYNSYPFTFGPGTKVDIK

SEQ ID NO: 8252 - protein, 108 aa, Homo sapiens; identical to SEQ ID NO: 8239
  Light chain

SEQ ID NO: 8253 - protein, 108 aa, Homo sapiens
  Light chain
EIVLTQSPGTLSLSPGERATLSCRASQSVSSTYLAWYQQKPGQAPRLLIYGASSRATGIPDRFSGSGSGTDFTLTISRLEPEDFAVYYCQQFGSSPFTFGPGTKLDIK

SEQ ID NO: 8254 - protein, 108 aa, Homo sapiens; identical to SEQ ID NO: 8048
  Light chain

SEQ ID NO: 8255 - protein, 108 aa, Homo sapiens; identical to SEQ ID NO: 8241
  Light chain

SEQ ID NO: 8256 - protein, 108 aa, Homo sapiens
  Light chain
EIVMTQSPATLSLSPGERATLSCRASQSVSSSYLSWYQQKPGQAPRLLIYGASTRATGIPARFSGSGSGTDFTLTISSLQPEDFAVYYCQQDYNLPFTFGPGTKVDIK

SEQ ID NO: 8257 - protein, 108 aa, Homo sapiens; identical to SEQ ID NO: 8241
  Light chain

SEQ ID NO: 8258 - protein, 108 aa, Homo sapiens; identical to SEQ ID NO: 8048
  Light chain

SEQ ID NO: 8259 - protein, 108 aa, Homo sapiens; identical to SEQ ID NO: 8256
  Light chain

SEQ ID NO: 8260 - protein, 108 aa, Homo sapiens; identical to SEQ ID NO: 8048
  Light chain

SEQ ID NO: 8261 - protein, 108 aa, Homo sapiens
  Light chain
EIVLTQSPGTLSLSPGERATLSCRASQSVSSSYLAWYQQKPGQAPRLLIYGASSRATGIPDRFSGSGSGTDFTLTISRLEPEDFAVYYCQHYGSSPWTFGQGTKVEIK

SEQ ID NO: 8262 - protein, 108 aa, Homo sapiens; identical to SEQ ID NO: 8241
  Light chain

SEQ ID NO: 8263 - protein, 108 aa, Homo sapiens; identical to SEQ ID NO: 8048
  Light chain

SEQ ID NO: 8264 - protein, 108 aa, Homo sapiens; identical to SEQ ID NO: 8144
  Light chain

SEQ ID NO: 8265 - protein, 108 aa, Homo sapiens; identical to SEQ ID NO: 8241
  Light chain

SEQ ID NO: 8266 - protein, 108 aa, Homo sapiens
  Light chain
EIVLTQSPGTLSLSPGERATLSCRASQSVSSSYLAWYQQKPGQAPRLLIYGASSRATGIPDRFSGSGSGTDFTLTISRLEPEDFAVYYCQQYGSSPWAFGQGTKVEIK

SEQ ID NO: 8267 - protein, 108 aa, Homo sapiens; identical to SEQ ID NO: 8239
  Light chain

SEQ ID NO: 8268 - protein, 108 aa, Homo sapiens; identical to SEQ ID NO: 8239
  Light chain

SEQ ID NO: 8269 - protein, 108 aa, Homo sapiens; identical to SEQ ID NO: 8241
  Light chain

SEQ ID NO: 8270 - protein, 108 aa, Homo sapiens
  Light chain
EIVLTQSPGTLSLSPGERATLSCRASQSVSSTYLAWYQQKPGQAPRLLIYGASSRATGIPDRFSGSGSGTDFTLTISRLEPEDFAVYYCQQLGSSPFTFGPGTKLDIK

SEQ ID NO: 8271 - protein, 108 aa, Homo sapiens; identical to SEQ ID NO: 8241
  Light chain

SEQ ID NO: 8272 - protein, 112 aa, Homo sapiens; identical to SEQ ID NO: 8053
  Light chain

SEQ ID NO: 8273 - protein, 108 aa, Homo sapiens; identical to SEQ ID NO: 8048
  Light chain

SEQ ID NO: 8274 - protein, 108 aa, Homo sapiens; identical to SEQ ID NO: 8048
  Light chain

SEQ ID NO: 8275 - protein, 108 aa, Homo sapiens; identical to SEQ ID NO: 8048
  Light chain

SEQ ID NO: 8276 - protein, 108 aa, Homo sapiens; identical to SEQ ID NO: 3
  Light chain

SEQ ID NO: 8277 - protein, 108 aa, Homo sapiens; identical to SEQ ID NO: 3
  Light chain

SEQ ID NO: 8278 - protein, 108 aa, Homo sapiens
  Light chain
EIVLTQSPGTLSLSPGERATLSCRASQTISSSYLAWYQQKPGQAPRLLIYGASSRATGIPDRFSGSGSGTDFTLTISRLEPEDFAVYYCQQYGISPFTFGPGTKVDIK

SEQ ID NO: 8279 - protein, 108 aa, Homo sapiens; identical to SEQ ID NO: 8048
  Light chain

SEQ ID NO: 8280 - protein, 108 aa, Homo sapiens; identical to SEQ ID NO: 8048
  Light chain

SEQ ID NO: 8281 - protein, 106 aa, Homo sapiens
  Light chain
EIVLTQSPGTLSLSPGERATLSCRASQSVSYLAWYQQKPGQAPRLLIYGASSRATGIPDRFSGSGSGTDFTLTISRLEPEDFAVYYCQHYGSSPWTFGQGTKVEIK

SEQ ID NO: 8282 - protein, 108 aa, Homo sapiens; identical to SEQ ID NO: 3
  Light chain

SEQ ID NO: 8283 - protein, 106 aa, Homo sapiens; identical to SEQ ID NO: 8281
  Light chain

SEQ ID NO: 8284 - protein, 108 aa, Homo sapiens; identical to SEQ ID NO: 3
  Light chain

SEQ ID NO: 8285 - protein, 108 aa, Homo sapiens; identical to SEQ ID NO: 3
  Light chain

SEQ ID NO: 8286 - protein, 108 aa, Homo sapiens; identical to SEQ ID NO: 3
  Light chain

SEQ ID NO: 8287 - protein, 108 aa, Homo sapiens; identical to SEQ ID NO: 8278
  Light chain

SEQ ID NO: 8288 - protein, 108 aa, Homo sapiens
  Light chain
EIVLTQSPGTLSLSPGERATLSCRASQSVSSSYLAWYQQKPGQAPRLLIYGASSRATGIPDRFSGSGSGTDFTLTISRLEPEDFAVYYCQQYGTSPFTFGPGTKVDIK

SEQ ID NO: 8289 - protein, 108 aa, Homo sapiens; identical to SEQ ID NO: 3
  Light chain

SEQ ID NO: 8290 - protein, 108 aa, Homo sapiens; identical to SEQ ID NO: 3
  Light chain

SEQ ID NO: 8291 - protein, 108 aa, Homo sapiens; identical to SEQ ID NO: 3
  Light chain

SEQ ID NO: 8292 - protein, 108 aa, Homo sapiens; identical to SEQ ID NO: 8288
  Light chain

SEQ ID NO: 8293 - protein, 108 aa, Homo sapiens; identical to SEQ ID NO: 3
  Light chain

SEQ ID NO: 8294 - protein, 108 aa, Homo sapiens; identical to SEQ ID NO: 3
  Light chain

SEQ ID NO: 8295 - protein, 108 aa, Homo sapiens; identical to SEQ ID NO: 8048
  Light chain

SEQ ID NO: 8296 - protein, 108 aa, Homo sapiens; identical to SEQ ID NO: 3
  Light chain

SEQ ID NO: 8297 - protein, 108 aa, Homo sapiens; identical to SEQ ID NO: 2
  Light chain

SEQ ID NO: 8298 - protein, 108 aa, Homo sapiens; identical to SEQ ID NO: 3
  Light chain

SEQ ID NO: 8299 - protein, 108 aa, Homo sapiens; identical to SEQ ID NO: 3
  Light chain

SEQ ID NO: 8300 - protein, 108 aa, Homo sapiens; identical to SEQ ID NO: 3
  Light chain

SEQ ID NO: 8301 - protein, 108 aa, Homo sapiens; identical to SEQ ID NO: 8048
  Light chain

SEQ ID NO: 8302 - protein, 108 aa, Homo sapiens
  Light chain
EIVLTQSPGTLSLSPGERATLSCRASQSVSSTYLAWYQQKPGQAPRLLIYGASSRATGIPDRFSGSGSGTDFTLTISRLEPEDFAVYYCQQFGSSPFTFGPGTKVDIK

SEQ ID NO: 8303 - protein, 108 aa, Homo sapiens; identical to SEQ ID NO: 3
  Light chain

SEQ ID NO: 8304 - protein, 107 aa, Homo sapiens
  Light chain
DIQMTQSPSSLSASVGDRVTITCRASQSISSYLNWYQQKPGKAPKLLIYAASSLLSGVPSRFSGSGSGTDFTLTISSLQPEDFATYYCQQSYSTPLTFGGGTKVEIK

SEQ ID NO: 8305 - protein, 108 aa, Homo sapiens; identical to SEQ ID NO: 3
  Light chain

SEQ ID NO: 8306 - protein, 107 aa, Homo sapiens
  Light chain
DIQMTQSPSSLSASVGDRVTITCRASQGISNYLAWFQQKPGKAPKSLIYAASSLQSGVPSKFSGSGSGTDFTLTISSLQPEDFATYYCQQYNSYPYTFGQGTKLEIK

SEQ ID NO: 8307 - protein, 108 aa, Homo sapiens
  Light chain
EIVLTQSPGTLSLSPGERATLSCRASQSVSSSYLAWYQQKPGQAPRLLIYGTSSRATGIPDRFSGSGSGTDFTLTISRLEPEDFAVYYCQQYGTSPWTFGQGTKVEIK

SEQ ID NO: 8308 - protein, 108 aa, Homo sapiens
  Light chain
EIVMTQSPATLSLSPGERATLTCRASQSGSSSYLSWYQQKAGQAPRLLIYGASTRATGIPARFSGSGSGTDFTLTISSLQPEDFAVYYCHQDYNLPYTFGQGTKLEIK

SEQ ID NO: 8309 - protein, 108 aa, Homo sapiens; identical to SEQ ID NO: 8048
  Light chain

SEQ ID NO: 8310 - protein, 108 aa, Homo sapiens; identical to SEQ ID NO: 3
  Light chain

SEQ ID NO: 8311 - protein, 108 aa, Homo sapiens; identical to SEQ ID NO: 3
  Light chain

SEQ ID NO: 8312 - protein, 107 aa, Homo sapiens; identical to SEQ ID NO: 8304
  Light chain

SEQ ID NO: 8313 - protein, 108 aa, Homo sapiens; identical to SEQ ID NO: 8278
  Light chain

SEQ ID NO: 8314 - protein, 106 aa, Homo sapiens; identical to SEQ ID NO: 8281
  Light chain

SEQ ID NO: 8315 - protein, 113 aa, Homo sapiens
  Light chain
DIVMTQSPDSLAVSLGERATINCKSSQSVLYRSNNKNYLAWYQQKPGQPPKVLIYWASTRESGVPDRFSGSGSGTDFTLTISSLQAEDVAVYYCHQYYSTPYTFGQGTKLEIK

SEQ ID NO: 8316 - protein, 108 aa, Homo sapiens
  Light chain
EIVMTQSPATLSLSPGERATLSCRASQSVSSSYLSWYQQKPGQAPRLLIYGASTRATGIPARFSGSGSGTDFTLTISSLQPEDFAVYYCQQDYNLPYTFGQGTKLEIK

SEQ ID NO: 8317 - protein, 113 aa, Homo sapiens
  Light chain
DIVMTQSPDSLAVSLGERATINCKSSQSVLYSSNNKNYLAWYQQKPGQPPKVLIYWASTRESGVPDRFSGSGSGTDFTLTISSLQAEDVAVYYCQQYCSTPYTFGQGTKLEIK

SEQ ID NO: 8318 - protein, 106 aa, Homo sapiens
  Light chain
EIVLTQSPDFQSVTPKEKVTITCRASQSIGSSLHWYQQKPDQSPKLLIKYASQSISGVPSRFSGSGSGTDFTLTINSLEAEDAAAYYCHQSSSLPTFGQGTKLEIK

SEQ ID NO: 8319 - protein, 112 aa, Homo sapiens
  Light chain
DIVMTQSPLSLPVTPGEPASISCRSSQSLLHSNGLNYLDWYLQKPGQSPQLLIYLGSNRASGVPDRFSGSGSGTDFTLKISRVEAEDVGVYYCMQALQTPITFGQGTRLEIK

SEQ ID NO: 8320 - protein, 111 aa, Homo sapiens
  Light chain
DIVMTQSPLSLPVTPGEPASISCRSSQSLLHSNGYNYLDWYLQKPGQSPQLLIYLGSNRASGVPDRFSGSGSGTDFTLKISRVEAEDVGVYYCMQSLQTITFGQGTRLEIK

SEQ ID NO: 8321 - protein, 108 aa, Homo sapiens; identical to SEQ ID NO: 8048
  Light chain

SEQ ID NO: 8322 - protein, 107 aa, Homo sapiens
  Light chain
DIQMTQSPSSLSASVGDRVTITCRASQGISNYLAWYQQKPGKVPKLLIYAASTLQSGVPSRFSGSGSGTDFTLTISSLQPEDVATYYCQKYNSAPWTFGQGTKVEIK

SEQ ID NO: 8323 - protein, 108 aa, Homo sapiens; identical to SEQ ID NO: 3
  Light chain

SEQ ID NO: 8324 - protein, 108 aa, Homo sapiens
  Light chain
EIVMTQSPATLSLSPGKRATLSCRASQSVSSSYLSWYQQKPGQAPRLLIYGASTRATGIPARFSGSGSGTNFTLTISSLQPEDFAVYYCQHVYHLPWTFGQGTKVEFK

SEQ ID NO: 8325 - protein, 108 aa, Homo sapiens; identical to SEQ ID NO: 3
  Light chain

SEQ ID NO: 8326 - protein, 108 aa, Homo sapiens; identical to SEQ ID NO: 3
  Light chain

SEQ ID NO: 8327 - protein, 108 aa, Homo sapiens; identical to SEQ ID NO: 8048
  Light chain

SEQ ID NO: 8328 - protein, 108 aa, Homo sapiens
  Light chain
EIVMTQSPATLSLSPGERATLSCRASQSVSSNYLSWYQQKPGQAPRLLIYGASTRATGIPARFSGSGSGTDFTLTISSLQPEDFAVYYCQQDYNLPLTFGGGTKVEIK

SEQ ID NO: 8329 - protein, 108 aa, Homo sapiens; identical to SEQ ID NO: 3
  Light chain

SEQ ID NO: 8330 - protein, 108 aa, Homo sapiens; identical to SEQ ID NO: 3
  Light chain

SEQ ID NO: 8331 - protein, 108 aa, Homo sapiens
  Light chain
EIVMTQSPATLSLPPGERATLSCRASQSFSSSYLSWYQQKPGQAPRLLIYGASTRATGIPARFSGSGSGTDFTLTISSLQPEDFAVYYCQQAYNLPYTFGQGTKLEIK

SEQ ID NO: 8332 - protein, 107 aa, Homo sapiens; identical to SEQ ID NO: 8304
  Light chain

SEQ ID NO: 8333 - protein, 108 aa, Homo sapiens; identical to SEQ ID NO: 3
  Light chain

SEQ ID NO: 8334 - protein, 108 aa, Homo sapiens; identical to SEQ ID NO: 8256
  Light chain

SEQ ID NO: 8335 - protein, 108 aa, Homo sapiens; identical to SEQ ID NO: 3
  Light chain

SEQ ID NO: 8336 - protein, 108 aa, Homo sapiens; identical to SEQ ID NO: 3
  Light chain

SEQ ID NO: 8337 - protein, 107 aa, Homo sapiens
  Light chain
DIQMTQSPSSLSASVGDRVTITCRANQGIRYDLGWYQQKPGKAPKRLISSASSLQSGVPSRFSGSGSGTEFTLTISSLQPEDFATYYCLQHNSYPFTFGPGTKVDIK

SEQ ID NO: 8338 - protein, 108 aa, Homo sapiens; identical to SEQ ID NO: 3
  Light chain

SEQ ID NO: 8339 - protein, 108 aa, Homo sapiens; identical to SEQ ID NO: 8278
  Light chain

SEQ ID NO: 8340 - protein, 108 aa, Homo sapiens; identical to SEQ ID NO: 8307
  Light chain

SEQ ID NO: 8341 - protein, 108 aa, Homo sapiens; identical to SEQ ID NO: 8278
  Light chain

SEQ ID NO: 8342 - protein, 108 aa, Homo sapiens; identical to SEQ ID NO: 3
  Light chain

SEQ ID NO: 8343 - protein, 108 aa, Homo sapiens
  Light chain
EIVMTQSPATLSLSPGERATLSCRASQTVSSIYLSWYQQKPGQAPRLLIYGSSTRATGIPARFSGSGSGTDFTLTISSLQPEDFAVYYCQQDYKLPYTFGQGTKLEIK

SEQ ID NO: 8344 - protein, 108 aa, Homo sapiens
  Light chain
EIVLTQSPGTLSLSPGERATLSCRASQSVSSSYLAWYQQKPGQAPRLLIYGASSRATGIPDRFSGSGSGTDFTLTISRLEPEDFAVYYCQQYGSSLWTFGQGTKVEIK

SEQ ID NO: 8345 - protein, 108 aa, Homo sapiens; identical to SEQ ID NO: 8288
  Light chain

SEQ ID NO: 8346 - protein, 108 aa, Homo sapiens; identical to SEQ ID NO: 2
  Light chain

SEQ ID NO: 8347 - protein, 108 aa, Homo sapiens; identical to SEQ ID NO: 8048
  Light chain

SEQ ID NO: 8348 - protein, 108 aa, Homo sapiens; identical to SEQ ID NO: 8256
  Light chain

SEQ ID NO: 8349 - protein, 108 aa, Homo sapiens
  Light chain
EIVLTQSPGTLSLSPGERATLSCRASQSVSSSYLAWYQQKPGQAPRLLIYGASSRATVIPDRFSGSGSGTDFTLTITRLEPEDFAVYYCQQYGVSPFTFGPGTKVDIK

SEQ ID NO: 8350 - protein, 108 aa, Homo sapiens
  Light chain
EIVLTQSPGTLSLSPGERATLSCRASQSVSSSCLAWYQQKPGQAPRLLIYGASSRATGIPDRFSGSGSGTDFTLTISRLEPEDFAVYYCQQYGISPFTFGPGTKVDIK

SEQ ID NO: 8351 - protein, 108 aa, Homo sapiens; identical to SEQ ID NO: 8350
  Light chain

SEQ ID NO: 8352 - protein, 108 aa, Homo sapiens; identical to SEQ ID NO: 3
  Light chain

SEQ ID NO: 8353 - protein, 108 aa, Homo sapiens
  Light chain
EIVLTQSPGTLSLSPGERATLSCRASQSVSSSYLAWYQQTPGQAPRLLIYGASSRATGIPDRFSGSGSGTDFTLTISRLEAEDFAVYYCQQYGTSPFTFGPGTIVDIK

SEQ ID NO: 8354 - protein, 108 aa, Homo sapiens; identical to SEQ ID NO: 3
  Light chain

SEQ ID NO: 8355 - protein, 108 aa, Homo sapiens; identical to SEQ ID NO: 3
  Light chain

SEQ ID NO: 8356 - protein, 108 aa, Homo sapiens; identical to SEQ ID NO: 3
  Light chain

SEQ ID NO: 8357 - protein, 106 aa, Homo sapiens; identical to SEQ ID NO: 8281
  Light chain

SEQ ID NO: 8358 - protein, 108 aa, Homo sapiens; identical to SEQ ID NO: 3
  Light chain

SEQ ID NO: 8359 - protein, 108 aa, Homo sapiens; identical to SEQ ID NO: 8353
  Light chain

SEQ ID NO: 8360 - protein, 108 aa, Homo sapiens; identical to SEQ ID NO: 3
  Light chain

SEQ ID NO: 8361 - protein, 112 aa, Homo sapiens
  Light chain
DIVMTQSPLSLPVTPGEPASISCRSSQSLLHSNGYNYLDWYLQKPGQSPQLLIYLGSNRASGVPDRFSGSGSGTDFTLKISRVEAEDVGVYYCMQTLQTPPTFGQGTKVEIK

SEQ ID NO: 8362 - protein, 108 aa, Homo sapiens; identical to SEQ ID NO: 3
  Light chain

SEQ ID NO: 8363 - protein, 108 aa, Homo sapiens; identical to SEQ ID NO: 8350
  Light chain

SEQ ID NO: 8364 - protein, 108 aa, Homo sapiens; identical to SEQ ID NO: 3
  Light chain

SEQ ID NO: 8365 - protein, 108 aa, Homo sapiens; identical to SEQ ID NO: 8350
  Light chain

SEQ ID NO: 8366 - protein, 108 aa, Homo sapiens; identical to SEQ ID NO: 8353
  Light chain

SEQ ID NO: 8367 - protein, 108 aa, Homo sapiens; identical to SEQ ID NO: 8350
  Light chain

SEQ ID NO: 8368 - protein, 108 aa, Homo sapiens; identical to SEQ ID NO: 8350
  Light chain

SEQ ID NO: 8369 - protein, 108 aa, Homo sapiens; identical to SEQ ID NO: 8353
  Light chain

SEQ ID NO: 8370 - protein, 108 aa, Homo sapiens; identical to SEQ ID NO: 8350
  Light chain

SEQ ID NO: 8371 - protein, 108 aa, Homo sapiens; identical to SEQ ID NO: 3
  Light chain

SEQ ID NO: 8372 - protein, 108 aa, Homo sapiens; identical to SEQ ID NO: 8350
  Light chain

SEQ ID NO: 8373 - protein, 108 aa, Homo sapiens; identical to SEQ ID NO: 8350
  Light chain

SEQ ID NO: 8374 - protein, 108 aa, Homo sapiens; identical to SEQ ID NO: 3
  Light chain

SEQ ID NO: 8375 - protein, 108 aa, Homo sapiens; identical to SEQ ID NO: 2
  Light chain

SEQ ID NO: 8376 - protein, 108 aa, Homo sapiens; identical to SEQ ID NO: 3
  Light chain

SEQ ID NO: 8377 - protein, 108 aa, Homo sapiens; identical to SEQ ID NO: 14
  Light chain

SEQ ID NO: 8378 - protein, 107 aa, Homo sapiens; identical to SEQ ID NO: 8249
  Light chain

SEQ ID NO: 8379 - protein, 108 aa, Homo sapiens; identical to SEQ ID NO: 3
  Light chain

SEQ ID NO: 8380 - protein, 107 aa, Homo sapiens; identical to SEQ ID NO: 17
  Light chain

SEQ ID NO: 8381 - protein, 108 aa, Homo sapiens; identical to SEQ ID NO: 3
  Light chain

SEQ ID NO: 8382 - protein, 108 aa, Homo sapiens; identical to SEQ ID NO: 3
  Light chain

SEQ ID NO: 8383 - protein, 108 aa, Homo sapiens; identical to SEQ ID NO: 8048
  Light chain

SEQ ID NO: 8384 - protein, 108 aa, Homo sapiens; identical to SEQ ID NO: 27
  Light chain

SEQ ID NO: 8385 - protein, 107 aa, Homo sapiens; identical to SEQ ID NO: 17
  Light chain

SEQ ID NO: 8386 - protein, 108 aa, Homo sapiens; identical to SEQ ID NO: 8048
  Light chain

SEQ ID NO: 8387 - protein, 108 aa, Homo sapiens; identical to SEQ ID NO: 3
  Light chain

SEQ ID NO: 8388 - protein, 108 aa, Homo sapiens
  Light chain
EIVLTQSPATLSLSPGERATLSCGASQSVSSNYLAWYQQKPGLAPRLLIYDASSRATGIPDRFSGSGSGTDFTLTISRLEPEDFAMYYCQQYGGSPWTFGQGTKVEIK

SEQ ID NO: 8389 - protein, 108 aa, Homo sapiens; identical to SEQ ID NO: 3
  Light chain

SEQ ID NO: 8390 - protein, 108 aa, Homo sapiens; identical to SEQ ID NO: 14
  Light chain

SEQ ID NO: 8391 - protein, 108 aa, Homo sapiens; identical to SEQ ID NO: 8048
  Light chain

SEQ ID NO: 8392 - protein, 107 aa, Homo sapiens; identical to SEQ ID NO: 6
  Light chain

SEQ ID NO: 8393 - protein, 112 aa, Homo sapiens
  Light chain
DVVMTQSPLSLPVTLGQSASISCRSSQSLVYSDGNTYLNWFQQRPGQSPRRLIYKVSNRDSGVPDRFSGSGSGTDFTLKISRVEAEDVGVYYCMQGTHWPITFGQGTRLEIK

SEQ ID NO: 8394 - protein, 108 aa, Homo sapiens; identical to SEQ ID NO: 23
  Light chain

SEQ ID NO: 8395 - protein, 108 aa, Homo sapiens; identical to SEQ ID NO: 3
  Light chain

SEQ ID NO: 8396 - protein, 112 aa, Homo sapiens; identical to SEQ ID NO: 21
  Light chain

SEQ ID NO: 8397 - protein, 108 aa, Homo sapiens
  Light chain
EIVLTQSPGTLSLSPGERATLSCRASQSVSSSYLAWYQQKPGQAPRLLIYGASSRATGIPDRFSGSGSGTDFTLTISRLEPEDFAVYYCQQYGTSPWTFGQGTKVEVK

SEQ ID NO: 8398 - protein, 107 aa, Homo sapiens; identical to SEQ ID NO: 24
  Light chain

SEQ ID NO: 8399 - protein, 108 aa, Homo sapiens; identical to SEQ ID NO: 8048
  Light chain

SEQ ID NO: 8400 - protein, 107 aa, Homo sapiens
  Light chain
DIQMTQSPSSLSASVGDRVTITCRASQGISNYLAWYQQKPGKVPKLLIYAASTLQSGVPSRFSGSGSGTDFTLTISSLQPEDVATYYCQKYNSAPFTFGQGTKLEIK

SEQ ID NO: 8401 - protein, 107 aa, Homo sapiens; identical to SEQ ID NO: 6
  Light chain

SEQ ID NO: 8402 - protein, 108 aa, Homo sapiens
  Light chain
EIVLTQSPGTLSLSPGERATLSCRASQSVSSNFLAWFQQKPGQAPRLLIYGASSRATGIPDRFSGSGSGTDFTLTISRLEPEDFAVYYCQHYGSSPFTFGPGTKVDIK

SEQ ID NO: 8403 - protein, 107 aa, Homo sapiens; identical to SEQ ID NO: 8014
  Light chain

SEQ ID NO: 8404 - protein, 107 aa, Homo sapiens; identical to SEQ ID NO: 24
  Light chain

SEQ ID NO: 8405 - protein, 108 aa, Homo sapiens; identical to SEQ ID NO: 2
  Light chain

SEQ ID NO: 8406 - protein, 107 aa, Homo sapiens; identical to SEQ ID NO: 6
  Light chain

SEQ ID NO: 8407 - protein, 108 aa, Homo sapiens; identical to SEQ ID NO: 8048
  Light chain

SEQ ID NO: 8408 - protein, 108 aa, Homo sapiens; identical to SEQ ID NO: 8048
  Light chain

SEQ ID NO: 8409 - protein, 107 aa, Homo sapiens; identical to SEQ ID NO: 8001
  Light chain

SEQ ID NO: 8410 - protein, 108 aa, Homo sapiens; identical to SEQ ID NO: 2
  Light chain

SEQ ID NO: 8411 - protein, 108 aa, Homo sapiens; identical to SEQ ID NO: 8256
  Light chain

SEQ ID NO: 8412 - protein, 108 aa, Homo sapiens
  Light chain
EIVLTQSPGTLSLSPGERATLSCRASQSGSSSYLAWYQQKPGQAPRLLIYGASSRATGIPDRFSGSGSGTDFTLTISRLEPEDFAVYYCQQYGTSPFTFGPGTKVDIK

SEQ ID NO: 8413 - protein, 108 aa, Homo sapiens; identical to SEQ ID NO: 8412
  Light chain

SEQ ID NO: 8414 - protein, 108 aa, Homo sapiens; identical to SEQ ID NO: 8048
  Light chain

SEQ ID NO: 8415 - protein, 108 aa, Homo sapiens; identical to SEQ ID NO: 3
  Light chain

SEQ ID NO: 8416 - protein, 107 aa, Homo sapiens; identical to SEQ ID NO: 11
  Light chain

SEQ ID NO: 8417 - protein, 108 aa, Homo sapiens; identical to SEQ ID NO: 3
  Light chain

SEQ ID NO: 8418 - protein, 107 aa, Homo sapiens; identical to SEQ ID NO: 8249
  Light chain

SEQ ID NO: 8419 - protein, 107 aa, Homo sapiens; identical to SEQ ID NO: 6
  Light chain

SEQ ID NO: 8420 - protein, 107 aa, Homo sapiens
  Light chain
DIQMTQSPSSLSASVGDRVTITCRASQGISNYLAWYQQKPGKVPKLLIYAASTLQSGVPSRFSGSGSGTDFTLTISSLQPEDVATYYCQVYNSAPYTFGQGTKLEIK

SEQ ID NO: 8421 - protein, 108 aa, Homo sapiens
  Light chain
EIVMTQSPATLSLSPGERATLSCRASQSVSSSYLSWYQQKPGQAPRLLIYGASTRATGIPARFSGSGSGTDFTLTISSLQPEDFAVYYCQQGYNLPFTFGPGTKVDIK

SEQ ID NO: 8422 - protein, 108 aa, Homo sapiens; identical to SEQ ID NO: 3
  Light chain

SEQ ID NO: 8423 - protein, 108 aa, Homo sapiens
  Light chain
DIQMTQSPSSLSASVGDRVTITCRASQGISNYLAWYQQKPGKVPKLLIYAASTLQSGVPSRFSGSGSGTDFTLTISSLQPEDVATYYCQKYNSAPPLTFGGGTKVEIK

SEQ ID NO: 8424 - protein, 108 aa, Homo sapiens
  Light chain
EIVMTQSPATLSLSPGERATLSCRASQSFSSSYLSWFQQKPGQAPRLLISGASTRATGIPARFSGSGSGTDFTLTISSLQPEDFAVYYCQQVYNLPWTFGQGTKVEIK

SEQ ID NO: 8425 - protein, 108 aa, Homo sapiens; identical to SEQ ID NO: 8256
  Light chain

SEQ ID NO: 8426 - protein, 108 aa, Homo sapiens; identical to SEQ ID NO: 2
  Light chain

SEQ ID NO: 8427 - protein, 108 aa, Homo sapiens; identical to SEQ ID NO: 2
  Light chain

SEQ ID NO: 8428 - protein, 108 aa, Homo sapiens; identical to SEQ ID NO: 3
  Light chain

SEQ ID NO: 8429 - protein, 108 aa, Homo sapiens; identical to SEQ ID NO: 2
  Light chain

SEQ ID NO: 8430 - protein, 108 aa, Homo sapiens
  Light chain
EIVLTQSPGTLSLSPGERATLSCRASQSVFSSYLAWYQQKPGQAPRLLIYGASSRATGIPDRFSGSGSGTDFTLTISRLEPEDFAVYYCQQYGTSPYTFGQGTKLEIK

SEQ ID NO: 8431 - protein, 107 aa, Homo sapiens; identical to SEQ ID NO: 24
  Light chain

SEQ ID NO: 8432 - protein, 108 aa, Homo sapiens; identical to SEQ ID NO: 8048
  Light chain

SEQ ID NO: 8433 - protein, 108 aa, Homo sapiens; identical to SEQ ID NO: 8048
  Light chain

SEQ ID NO: 8434 - protein, 108 aa, Homo sapiens; identical to SEQ ID NO: 8048
  Light chain

SEQ ID NO: 8435 - protein, 108 aa, Homo sapiens; identical to SEQ ID NO: 8256
  Light chain

SEQ ID NO: 8436 - protein, 108 aa, Homo sapiens; identical to SEQ ID NO: 3
  Light chain

SEQ ID NO: 8437 - protein, 108 aa, Homo sapiens; identical to SEQ ID NO: 8256
  Light chain

SEQ ID NO: 8438 - protein, 107 aa, Homo sapiens
  Light chain
DIQMTQSPSSLSASVGDRVTITCRASQGISNYLAWYQQKPGKVPKLLIYAASTLQSGVPSRFSGSGSGTDFTLTISSLQPEDVATYYCQEYSSAPWTFGQGTKVEIK

SEQ ID NO: 8439 - protein, 108 aa, Homo sapiens; identical to SEQ ID NO: 8048
  Light chain

SEQ ID NO: 8440 - protein, 108 aa, Homo sapiens
  Light chain
EIVMTQSPATLSLSPGERATLSCRASQSVSSSYLSWYQQKPGQAPRLLIYGASTRATGIPARFSGSGSETDFTLTISSLQPEDFAVYYCQQVYNLPFTFGPGTKVDIK

SEQ ID NO: 8441 - protein, 108 aa, Homo sapiens
  Light chain
EIVLTQSPGTLSLSPGERATLSCRASQSVSSSYLAWYQQKPGQAPRLLIYGASSRATGIPDRFSGSGSGTDFTLTISRLEPEDFAVYYCQKYGSSPFTFGQGTKLEIK

SEQ ID NO: 8442 - protein, 108 aa, Homo sapiens
  Light chain
EIVLTQSPATLSLSPGERATLSCRASQSVSSYLAWYQQKPGQAPRLLIYDASNRATGIPARFSGSGSGTDFTLTISSLEPEDFAVYYCQQRSNWPPYTFGQGTKLEIK

SEQ ID NO: 8443 - protein, 108 aa, Homo sapiens; identical to SEQ ID NO: 3
  Light chain

SEQ ID NO: 8444 - protein, 108 aa, Homo sapiens; identical to SEQ ID NO: 3
  Light chain

SEQ ID NO: 8445 - protein, 108 aa, Homo sapiens; identical to SEQ ID NO: 3
  Light chain

SEQ ID NO: 8446 - protein, 108 aa, Homo sapiens; identical to SEQ ID NO: 3
  Light chain

SEQ ID NO: 8447 - protein, 108 aa, Homo sapiens; identical to SEQ ID NO: 8048
  Light chain

SEQ ID NO: 8448 - protein, 108 aa, Homo sapiens
  Light chain
EIVMTQSPATLSLSPGERATLSCRASQSGSSSYLSWYQQKPGQAPRLLIYGASTRATGIPARFSGSGSGTDFTLTISSLQPEDFAVYYCHQDYNLPYTFGQGTKLEIK

SEQ ID NO: 8449 - protein, 106 aa, Homo sapiens; identical to SEQ ID NO: 8
  Light chain

SEQ ID NO: 8450 - protein, 108 aa, Homo sapiens; identical to SEQ ID NO: 3
  Light chain

SEQ ID NO: 8451 - protein, 108 aa, Homo sapiens; identical to SEQ ID NO: 2
  Light chain

SEQ ID NO: 8452 - protein, 106 aa, Homo sapiens; identical to SEQ ID NO: 8
  Light chain

SEQ ID NO: 8453 - protein, 108 aa, Homo sapiens; identical to SEQ ID NO: 3
  Light chain

SEQ ID NO: 8454 - protein, 107 aa, Homo sapiens; identical to SEQ ID NO: 16
  Light chain

SEQ ID NO: 8455 - protein, 108 aa, Homo sapiens
  Light chain
EIVLTQSPATLSLSPGERATLSCGASQSVSSSYLAWYQQKPGLAPRLLIYDTSSRATGIPDRFSGSGSGTDFTLTITRLEPEDFAVYYCQQYGRSPWTFGQGTKVEIK

SEQ ID NO: 8456 - protein, 108 aa, Homo sapiens
  Light chain
EIVLTQSPGTLSLSPGERATLSCRASQSVSSSYLAWYQQKPGQAPRLLIYGSSSRATGIPDRFSGSGSGTDFTLTISRLEPEDFAVYYCQHYGSSPFTFGPGTKVDIK

SEQ ID NO: 8457 - protein, 112 aa, Homo sapiens; identical to SEQ ID NO: 21
  Light chain

SEQ ID NO: 8458 - protein, 108 aa, Homo sapiens; identical to SEQ ID NO: 8288
  Light chain

SEQ ID NO: 8459 - protein, 108 aa, Homo sapiens; identical to SEQ ID NO: 8455
  Light chain

SEQ ID NO: 8460 - protein, 109 aa, Homo sapiens; identical to SEQ ID NO: 19
  Light chain

SEQ ID NO: 8461 - protein, 109 aa, Homo sapiens
  Light chain
EIVLTQSPGTLSLSPGERATLSCRASQSVSSSYLAWYQQKPGQAPRLLIYGASSRATGIPDRFSGSGSGTDFTLTISRLEPEDFAVYYCQQYGSSTMYTFGQGTKLEIK

SEQ ID NO: 8462 - protein, 107 aa, Homo sapiens; identical to SEQ ID NO: 8014
  Light chain

SEQ ID NO: 8463 - protein, 108 aa, Homo sapiens; identical to SEQ ID NO: 8288
  Light chain

SEQ ID NO: 8464 - protein, 106 aa, Homo sapiens; identical to SEQ ID NO: 8
  Light chain

SEQ ID NO: 8465 - protein, 106 aa, Homo sapiens; identical to SEQ ID NO: 8
  Light chain

SEQ ID NO: 8466 - protein, 106 aa, Homo sapiens; identical to SEQ ID NO: 8
  Light chain

SEQ ID NO: 8467 - protein, 106 aa, Homo sapiens; identical to SEQ ID NO: 8
  Light chain

SEQ ID NO: 8468 - protein, 108 aa, Homo sapiens; identical to SEQ ID NO: 12
  Light chain

SEQ ID NO: 8469 - protein, 108 aa, Homo sapiens; identical to SEQ ID NO: 3
  Light chain

SEQ ID NO: 8470 - protein, 106 aa, Homo sapiens; identical to SEQ ID NO: 8
  Light chain

SEQ ID NO: 8471 - protein, 106 aa, Homo sapiens; identical to SEQ ID NO: 8
  Light chain

SEQ ID NO: 8472 - protein, 108 aa, Homo sapiens; identical to SEQ ID NO: 8456
  Light chain

SEQ ID NO: 8473 - protein, 108 aa, Homo sapiens; identical to SEQ ID NO: 8442
  Light chain

SEQ ID NO: 8474 - protein, 106 aa, Homo sapiens; identical to SEQ ID NO: 8
  Light chain

SEQ ID NO: 8475 - protein, 108 aa, Homo sapiens; identical to SEQ ID NO: 3
  Light chain

SEQ ID NO: 8476 - protein, 106 aa, Homo sapiens; identical to SEQ ID NO: 8
  Light chain

SEQ ID NO: 8477 - protein, 107 aa, Homo sapiens
  Light chain
DIQMTQSPSSLSASVGDRVTITCRASQRISSYLDWYQQKPGKAPKLLIYAASSLQSGVPSRFSGSGSGTDFTLTISSLQPEDFATYYCQQSYTTPLTFGGGTKVEIE

SEQ ID NO: 8478 - protein, 106 aa, Homo sapiens; identical to SEQ ID NO: 8
  Light chain

SEQ ID NO: 8479 - protein, 108 aa, Homo sapiens; identical to SEQ ID NO: 12
  Light chain

SEQ ID NO: 8480 - protein, 108 aa, Homo sapiens; identical to SEQ ID NO: 2
  Light chain

SEQ ID NO: 8481 - protein, 108 aa, Homo sapiens
  Light chain
EIVLTQSPATLSLSPGERATLSCGASQSVNNRYLAWYQQKPGLAPRLLIYDASTRATGIPDRFSGSGSGTDFTLTISRLEPEDFAVYYCQQYGNSPWTFGQGTKVEIK

SEQ ID NO: 8482 - protein, 106 aa, Homo sapiens; identical to SEQ ID NO: 8
  Light chain

SEQ ID NO: 8483 - protein, 106 aa, Homo sapiens; identical to SEQ ID NO: 8
  Light chain

SEQ ID NO: 8484 - protein, 108 aa, Homo sapiens; identical to SEQ ID NO: 8288
  Light chain

SEQ ID NO: 8485 - protein, 108 aa, Homo sapiens; identical to SEQ ID NO: 3
  Light chain

SEQ ID NO: 8486 - protein, 108 aa, Homo sapiens; identical to SEQ ID NO: 8456
  Light chain

SEQ ID NO: 8487 - protein, 108 aa, Homo sapiens
  Light chain
EIVMTQSPATLSLSPGERATLSCRASQSVSSSYLSWYQQKPGQAPRLLIYGASTRATGIPARFSGSGSGTDFTLTISSLQPEDFAVYYCQQDYNLPLTFGGGTKVEIK

SEQ ID NO: 8488 - protein, 108 aa, Homo sapiens; identical to SEQ ID NO: 2
  Light chain

SEQ ID NO: 8489 - protein, 108 aa, Homo sapiens; identical to SEQ ID NO: 2
  Light chain

SEQ ID NO: 8490 - protein, 106 aa, Homo sapiens; identical to SEQ ID NO: 8
  Light chain

SEQ ID NO: 8491 - protein, 108 aa, Homo sapiens; identical to SEQ ID NO: 2
  Light chain

SEQ ID NO: 8492 - protein, 108 aa, Homo sapiens
  Light chain
EIVLTQSPGTLSLSPGERATLSCGASQSVGSNYFAWYQQKPGQAPRLLIYGASSRATGIPDRFSGSGSGTDFTLTISRLETEDFAVFYCQHYGSSPWTFGQGTKVEIK

SEQ ID NO: 8493 - protein, 108 aa, Homo sapiens; identical to SEQ ID NO: 8288
  Light chain

SEQ ID NO: 8494 - protein, 108 aa, Homo sapiens; identical to SEQ ID NO: 2
  Light chain

SEQ ID NO: 8495 - protein, 108 aa, Homo sapiens; identical to SEQ ID NO: 8455
  Light chain

SEQ ID NO: 8496 - protein, 122 aa, Homo sapiens
  Heavy chain
QVQLQESGPGLVKPSETLSLTCTVSGGSISSYYWSWIRQPLGKGLEWIAYIYYTGSTNYNPSLKSRVTMSVDTSKNQFSLELSSVTAADTAVYYCARTLRYFDWLSSFDYWGQGTLVTVSSA

SEQ ID NO: 8497 - protein, 121 aa, Homo sapiens
  Heavy chain
QLQLQESGGGVVRPGGSLRLSCTVSGGSISSSSYYWGWIRQPPGKGLEWIGNIYYSGNTYYNPSLKSRVTISVDTSKNQFSLKLSSVTAADTAVYYCARRRIQLWSFDYWGQGTLVTVSSA

SEQ ID NO: 8498 - protein, 121 aa, Homo sapiens; identical to SEQ ID NO: 8497
  Heavy chain

SEQ ID NO: 8499 - protein, 121 aa, Homo sapiens; identical to SEQ ID NO: 8497
  Heavy chain

SEQ ID NO: 8500 - protein, 121 aa, Homo sapiens
  Heavy chain
QVQLVESGGGLVKPGGSLRLSCAASGFTFSDYYMSWVRQAPGKGLEWVAVISYDGSNKYYADSVKGRFTISRDNSKNTLYLQMNSLRAEDTAVYYCARWGSGSYYNGGLLGPGNPGHRLLS

SEQ ID NO: 8501 - protein, 121 aa, Homo sapiens; identical to SEQ ID NO: 8497
  Heavy chain

SEQ ID NO: 8502 - protein, 121 aa, Homo sapiens; identical to SEQ ID NO: 8497
  Heavy chain

SEQ ID NO: 8503 - protein, 124 aa, Homo sapiens
  Heavy chain
QVQLQESGPGLVKPSETLSLTCTVSGGSISSYYWSWIRQPPGKGLEWIGYIYYSGSTKYNPSLKSRVTISRDNAKNSLYLQMNSLRAEDTALYHCAREGNWRNYYYYYGMDVWGQGTTVTVSSA

SEQ ID NO: 8504 - protein, 115 aa, Homo sapiens
  Heavy chain
EVQLVESGGGLVKPGGSLRLSCAASGFTFSNAWMSWVRQAPGKGLEWVGRIKSKTDGGTTDYAAPVKGRFTISRDDSKNTLYLQLNSLKIEDTAVYYCTIIAAAGHYWGQGTLVT

SEQ ID NO: 8505 - protein, 116 aa, Homo sapiens
  Heavy chain
QVQLVQSGAEVKKPGASVKVSCKASGYTFTSYGISWVRQAPGQGLEWMGWISAYNGNTNYAQKLQGRVTMTTDTSTSTAYMELRSLRSDDTAVYYCARGWPSDYWGQGTLVTVSSA

SEQ ID NO: 8506 - protein, 121 aa, Homo sapiens; identical to SEQ ID NO: 8497
  Heavy chain

SEQ ID NO: 8507 - protein, 117 aa, Homo sapiens
  Heavy chain
EVQLVESGGGVVRPGGSLRLSCAASGFTFDDYGMSWVRQAPGKGLEWVSGINWNGGSTGYADSVKGRFTISRDNAKNSLYLQMNSLRAEDTALYHCARGDVDIVATFDYWGQGTLVT

SEQ ID NO: 8508 - protein, 121 aa, Homo sapiens; identical to SEQ ID NO: 8497
  Heavy chain

SEQ ID NO: 8509 - protein, 121 aa, Homo sapiens
  Heavy chain
EVQLVESGGGVVRPGGSLRLSCAASGFTFDDYGMSWVRQAPGKGLEWVSGINWNGGSTGYADSVKGRFTISRDNAKNSLYLQMNSLRAEDTALYHCAREDNWRNYYYYYGMDVWGQGTTVT

SEQ ID NO: 8510 - protein, 121 aa, Homo sapiens; identical to SEQ ID NO: 8497
  Heavy chain

SEQ ID NO: 8511 - protein, 121 aa, Homo sapiens; identical to SEQ ID NO: 8497
  Heavy chain

SEQ ID NO: 8512 - protein, 122 aa, Homo sapiens
  Heavy chain
QVQLVESGGGVVQPGRSLRLSCAASGFTFSSYGMHWVRQAPGKGLEWVAVIWYDGSNKYYADSVKGRFTISRDNSKNTLYLQMNSLRAEDTAVYYCARDQEYYYGSGSSNWFDPWGQGTLVT

SEQ ID NO: 8513 - protein, 115 aa, Homo sapiens; identical to SEQ ID NO: 8504
  Heavy chain

SEQ ID NO: 8514 - protein, 121 aa, Homo sapiens; identical to SEQ ID NO: 8497
  Heavy chain

SEQ ID NO: 8515 - protein, 124 aa, Homo sapiens
  Heavy chain
QVQLQESGPGLVKPSETLSLTCTVSGGSISSYYWSWIRQPPGKGLEWIAYIYYTGSTNYNPSLKSRVTMSVDNAKNSLYLQMNSLRAEDTALYHCAREDNWRNYYYYYGTDVWGQGTTVTVSSA

SEQ ID NO: 8516 - protein, 122 aa, Homo sapiens
  Heavy chain
QVQLQESGPGLVKPSETLSLTCTVSGGSISSYYWSWIRQPLGKGLEWIAYIYYTGSTNYNPSLKSRVTMSVDTSKNQFSLELSSVTAADTAVYYCARTRRYFDWLSSFDYWGQGTLVTVSSA

SEQ ID NO: 8517 - protein, 116 aa, Homo sapiens; identical to SEQ ID NO: 8505
  Heavy chain

SEQ ID NO: 8518 - protein, 115 aa, Homo sapiens; identical to SEQ ID NO: 8504
  Heavy chain

SEQ ID NO: 8519 - protein, 122 aa, Homo sapiens
  Heavy chain
QVQLQESGPGLVKPSETLSLTCTVSGGSISSYYWSWIRQPLGKGLEWIAYIYYTGSTNYNPSLKSRVTMSVDTSKNQFSLELSSVTAADTAVYYCARALRYFDWLSSFDYWGQGTLVTVSSA

SEQ ID NO: 8520 - protein, 116 aa, Homo sapiens
  Heavy chain
QVQLVQSGAEVKKPGASVKVSCKASGYTFTSYGISWVRQALGQGLEWMGWISAYNGNTNYAQKLQGRVTMTTDTSTSTAYMELRSLRSDDTAVYYCARRWPSDYWGQGTLVTVSSA

SEQ ID NO: 8521 - protein, 122 aa, Homo sapiens
  Heavy chain
QVQLQESGPGLVKPSETLSLTCTVSGGSISSYYWSWIRQPLGKGLEWIAYIYYTGSTNYNPSLKSRVTMSVDTSKNQFSLELSSVTAADTAVYYCARPLRYFDWLSSFDYWGQGTLVTVSSA

SEQ ID NO: 8522 - protein, 121 aa, Homo sapiens
  Heavy chain
EVQLVESGGGVVRPGGSLRLSCAASGFTFDDYGMSWVRQAPGKGLEWVSGINWNGGSTGYADSVKGRFTISRDNAKNSLYLQMNSLRAEDTALYHCASEDNWRNYYYYYGMDVWGQGTTVT

SEQ ID NO: 8523 - protein, 123 aa, Homo sapiens
  Heavy chain
QVQLVESGGGVVQPGRSLRLSCAASGFTFSSYGMHWVRQAPGKGLEWVAVIWYDGSNKYYADSVKGRFTISRDNSKNTLYLQMNSLRAEDTAVYYCARPLTMVRGRAYFDYWGQGTLVTVSSA

SEQ ID NO: 8524 - protein, 121 aa, Homo sapiens; identical to SEQ ID NO: 8509
  Heavy chain

SEQ ID NO: 8525 - protein, 122 aa, Homo sapiens
  Heavy chain
QVQLQESGPGLVKPSETLSLTCTVSGGSISSYYWSWIRQPLGKGLEWIAYIYYTGSTNYNPSLKSRVTMSVDTSKNQFSLELSSVTAADTAVYYCARTLRYVDWLSSFDYWGQGTLVTVSSA

SEQ ID NO: 8526 - protein, 122 aa, Homo sapiens
  Heavy chain
QVQLQESGPGLVKPSETLSLTCTVSGGSISSYYWSWIRQPLGKGLEWIGYMYYSGSTNYNPSLKSRVTISVDTSKNQFSLKLSSVTAADTAVYYCARERYSSSWYRAFDIWGQGTMVTVSSA

SEQ ID NO: 8527 - protein, 116 aa, Homo sapiens; identical to SEQ ID NO: 8505
  Heavy chain

SEQ ID NO: 8528 - protein, 122 aa, Homo sapiens
  Heavy chain
QVQLQESGPGLVKPSETLSLTCTVSGGSISSYYWSWIRQPLGKGLEWIAYIYYTGSTNYNPSLKSRVTMSVDTSKNQFSLELSSVTAADTAVYYCASTLRYFDWLSSFDYWGQGTLVTVSSA

SEQ ID NO: 8529 - protein, 118 aa, Homo sapiens
  Heavy chain
QVQLQESGPGLVKPSETLSLTCTVSGGSISSYYWSWIRQPPGKGLEWIAYIYYTGSTNYNPSLKSRVTMSVDTSKNQFSLELSSVTAADTAVYYCARTVRYFDWLSSFDYWGQGTLVT

SEQ ID NO: 8530 - protein, 126 aa, Homo sapiens
  Heavy chain
QVQLVESGGGVVQPGRSLRLSCAASGFTFNNYGMHWVRQAPGKGLEWVTIIWHDGSNKYYADSVKGRFTISRDNSKNMLYLQMNSLRAEDTAVYYCARGRAYYYGSGSYYNFDYWGQGTLVTVSSA

SEQ ID NO: 8531 - protein, 112 aa, Homo sapiens
  Heavy chain
QVQLVQSGAEVKKPGASVKVSCKASGYTFTSYGISWVRQAPGQGLEWMGWISAYNGNTNYAQKLQGRVTMTTDTSTSTAYMELRSLRSDDTAVYYCARGWPYDYWGQGTLVT

SEQ ID NO: 8532 - protein, 121 aa, Homo sapiens; identical to SEQ ID NO: 8497
  Heavy chain

SEQ ID NO: 8533 - protein, 118 aa, Homo sapiens
  Heavy chain
QVQLQESGPGLVKPSETLSLTCTVSGGSISSYYWSWIRQPPGKGLEWIAYIYYTGSTNYNPSLKSRVTMSVDTSKNQFSLELSSVTAADTAVYYCAGTLRYFDWLSSFDYWGQGTLVT

SEQ ID NO: 8534 - protein, 115 aa, Homo sapiens; identical to SEQ ID NO: 8504
  Heavy chain

SEQ ID NO: 8535 - protein, 121 aa, Homo sapiens
  Heavy chain
EVQLVESGGGVVRPGGSLRLSCAASGFTFDDYGMSWVRQAPGKGLEWVSGINWNGGSTGYADSVKGRFTISRDNAKNSLYLQMNSLRAEDTALYHCAREDNWRNYYYSYGMDVWGQGTTVT

SEQ ID NO: 8536 - protein, 121 aa, Homo sapiens; identical to SEQ ID NO: 8497
  Heavy chain

SEQ ID NO: 8537 - protein, 121 aa, Homo sapiens; identical to SEQ ID NO: 8497
  Heavy chain

SEQ ID NO: 8538 - protein, 118 aa, Homo sapiens
  Heavy chain
QVQLQESGPGLVKPSETLSLTCTVSGGSISSYYWSWIRQPPGKGLEWIAYIYYTGSTNYNPSLKSRVTMSVDTSKNQFSLELSSVTAADTAVYYCARTLRDFDWLSSFDYWGQGTLVT

SEQ ID NO: 8539 - protein, 117 aa, Homo sapiens
  Heavy chain
QLQLQESGPGLVKPSETLSLTCTVSGGSISSSSYYWGWIRQPPGKGLEWIGNIYYSGNTYYNPSLKSRVTISVDTSKNQFSLKLSSVTAADTAVYYCARRRIQLWSFGYWGQGTLVT

SEQ ID NO: 8540 - protein, 121 aa, Homo sapiens; identical to SEQ ID NO: 8509
  Heavy chain

SEQ ID NO: 8541 - protein, 121 aa, Homo sapiens
  Heavy chain
EVQLVESGGGVVRPGGSLRLSCAASGFTFDDYGMSWVRQAPGKGLEWVSGINWNGGSTGYADSVKGRFTISRDNAKNSLYLQMNSLRAEDTALYHCAREDNWRKYYYYYGMDVWGQGTTVT

SEQ ID NO: 8542 - protein, 120 aa, Homo sapiens
  Heavy chain
QVQLVESGGGVVQPGRSLRLSCAASGFTFSSYGMHWVRQAPGKGLEWVAVIWYDGNNKHYADSVKGRFTISRDNSKNTLYLQMNSLRAEDTAVYYCARGDILTGYYGYWGQGTLVAVSSA

SEQ ID NO: 8543 - protein, 120 aa, Homo sapiens
  Heavy chain
QVQLVESGGGVVQPGRSLRLSCAASGFTFNSYGMHWVRQAPGKGLEWVAVIWYDGNNKHYADSVKGRFTISRDNSKNTLYLQMNSLRAEDTAVYYCVRGDILTGYYGYWGQGTLVTVSSA

SEQ ID NO: 8544 - protein, 119 aa, Homo sapiens
  Heavy chain
QVQLVESGGGVVQPGRSLRLSCAASGFTFSSYGIHWVRQAPGKGLEWVAVIWYDGRNKYYADSVKGRFTISRDNSKNTLYLQMNSLRAEDTAVYFCARGGQLGHFDYWGQGTLVTVSSA

SEQ ID NO: 8545 - protein, 119 aa, Homo sapiens
  Heavy chain
QVQLVESGGGVVQPGRSLRLSCAASGFTLSSYGMHWVRQAPGKGLEWVAVIWYDGSNKYYADSVKGRFTISRDNSKNTLYLQMSSLRAEDTAVYYCARVHQLGPFDYWGQGTLVTVSSA

SEQ ID NO: 8546 - protein, 120 aa, Homo sapiens
  Heavy chain
QLQLQESGPGLVKPSETLSLTCTVSGGSISSNSYYWGWIRQPPGEGLEWIGSIYYSGHTYYNPSLKSRVTISVDTPKNQFSLKLSSVTAADTAVYFCARMVRGLIINYWGQGTLVTVSSA

SEQ ID NO: 8547 - protein, 119 aa, Homo sapiens
  Heavy chain
QVQLVESGGGVVQPGRSLRLSCAASGFTFSTYGMHWVRLAPGKGLEWVAVIFNDGNNKYYADSVKGRFTISRDNSKNTLYLQMNSLRAEDTAMYYCARKGHLGPFDYWGQGTLVTVSSA

SEQ ID NO: 8548 - protein, 119 aa, Homo sapiens
  Heavy chain
QVQLVESGGGVVQPGRSLRLSCAASGFTFSSHGMHWVRQAPGKGLEWVAVTWYDGSNKYYADSVKGRFTISRDNSKNTLYLQMNSLRAEDTAVYYCARGDLRGWFDPWGQGTLVTVSSA

SEQ ID NO: 8549 - protein, 122 aa, Homo sapiens
  Heavy chain
QVQLVESGGGVVQPGRSLRLSCAASGFTFSSYGMHWVRQAPGKGLEWVAVIWYDGSNKYYADSVKGRFTISRDNSKNTLNLQMNSLRAEDTAVYYCAREGGSGWYEYLDLWGRGTLVSVSSA

SEQ ID NO: 8550 - protein, 120 aa, Homo sapiens
  Heavy chain
QVQLVESGGGVVQPGRSLRLSCAASGFTFNSYGMHWVRQAPGKGLEWVAVIWYDGNNKHYADSVKGRFTISRDNSKNTLYLQMNSLRAEDTAVYYCGRGDILTGYYGYWGQGTLVTVSSA

SEQ ID NO: 8551 - protein, 119 aa, Homo sapiens
  Heavy chain
QVQLVESGGGVVQPGRSLRLSCAASGFTLSRYGMHWVRQAPGKGLEWVAVTWYDGSNKNYADSVKGRFTISRDNSKNTLYLQMNSLRVEDTAVYYCTRVDWWGVFDFWGQGTLVTVSSA

SEQ ID NO: 8552 - protein, 119 aa, Homo sapiens
  Heavy chain
QVQLVESGGGVVQPGRSLRLSCAASGFTFRSFGMHWVRQAPGKGLEWVTAIWYDGNNKYYADSVKGRFTISRDNSKNTLYLQMNSLRAEDTAVYYCARGGQLGHFDFWGQGTLVTVSSA

SEQ ID NO: 8553 - protein, 119 aa, Homo sapiens
  Heavy chain
QVQLVESGGGVVQPGRSLRLSCAASGFTFSSYGMHWVRQAPGKGLEWVAVIWYDGSNKHYADSVKGRYTISRDNSKNTLYLQMNSLRAEDTALYYCARGGLIGPFDYWGQGTLVTVSSA

SEQ ID NO: 8554 - protein, 119 aa, Homo sapiens
  Heavy chain
QVQLVESGGGVVQPGRSLRLSCAASGFTFSRYGMHWVRQAPGKGLEWVAVIWYDGNNKYYADSVKGRFTISRDNSKNTLNLQMNSLRAEDTAVYYCARAGILTGLDYWGQGTLVTVSSA

SEQ ID NO: 8555 - protein, 119 aa, Homo sapiens; identical to SEQ ID NO: 8547
  Heavy chain

SEQ ID NO: 8556 - protein, 120 aa, Homo sapiens
  Heavy chain
QVQLVESGGGVVQPGRSLRLSCAASGFTFSSYGMHWVRQAPGKGLEWVAVIWYDGNNKHYADSVKGRFTISRDNSKNTLYLQMNSLRAEDTAVYYCARGDILTGYYSYWGQGTLVAVSSA

SEQ ID NO: 8557 - protein, 119 aa, Homo sapiens
  Heavy chain
QVQLVESGGGVVQPGRSLRLSCAASGFTFSSYGMNWVRQAPGKGLEWVAVIWYGGSNKYYTDSVKGRFTISRDNSKNTLYLQMNSLRAEDTAVYYCARVHLLGPFDYWGQGTLVTVSSA

SEQ ID NO: 8558 - protein, 121 aa, Homo sapiens
  Heavy chain
QVQLVESGGGVVQPGRSLRLSCAASGFTFSSYGMHWVRQAPGKGLEWVAVIWYDGNNRYYADSVKGRFTISRDNSKNTLYLQMNSLRAEDTAVYYCARGLLWFGESLDYWGLGTLVTVSSA

SEQ ID NO: 8559 - protein, 119 aa, Homo sapiens
  Heavy chain
QVQLVESGGGVVQPGRSLRLSCAASGFTFSRFGVNWVRQAPGKGLEWVAVIWYDGSNKYYADSVKGRFTISRDNSKNTLFLQMNSLRAEDTAVYYCARVPQLGPFDYWGQGTLVTVSSA

SEQ ID NO: 8560 - protein, 119 aa, Homo sapiens
  Heavy chain
QVQLVESGGGVVQPGRSLRLSCAASGFTLSRYGMHWVRQAPGKGLEWVAVTWYDGSNKNYADSVKGRFTISRDNSKNTLYLQMNSLRVEDTAVYYCTRVDWWGAFDFWGQGTLVTVSSA

SEQ ID NO: 8561 - protein, 122 aa, Homo sapiens
  Heavy chain
QVQLVESGGGVVQPGRSLRLSCAASGFTFSSYGMHWVRQAPGKGLEWVAVIWYDGSNKYYADSVKGRFTISRDNSKNTLNLQMNSLRAEDTAVYYCAREGGSGWYEYIDLWGRGTLVSVSSA

SEQ ID NO: 8562 - protein, 121 aa, Homo sapiens
  Heavy chain
QVQLVESGGGVVQPGRSLRLSCAASGFTFSNYCMHWVRQAPGKGLEWVAVIWYDGRNKYYADSVKGRFTISRDNSKSTLYLQMNSLRAEDTAVYYCSRGLLWFGESLDYWGQGTLVTVSSA

SEQ ID NO: 8563 - protein, 120 aa, Homo sapiens
  Heavy chain
QVQLVESGGGVVQPGRSLRLSCAASGFTFSSYGMHWVRQAPGKGLEWVAVIWYDGSNKYYADSVKGRFTISRDNSKNTLYLQMNSLRAEDTAVYYCARGDILTGYYDYWGQGTLVTVSSA

SEQ ID NO: 8564 - protein, 120 aa, Homo sapiens
  Heavy chain
QVQLVESGGGVVQPGRSLRLSCAASGFTFNSYGMHWVRQAPGKGLEWVAVIWYDGNNKHYADSVKGRFTISRDNSKNTLYLQMNSLRAEDTAVYYCVRGDILTGYYSYWGQGTLVTVSSA

SEQ ID NO: 8565 - protein, 120 aa, Homo sapiens; identical to SEQ ID NO: 8543
  Heavy chain

SEQ ID NO: 8566 - protein, 119 aa, Homo sapiens; identical to SEQ ID NO: 8545
  Heavy chain

SEQ ID NO: 8567 - protein, 120 aa, Homo sapiens; identical to SEQ ID NO: 8543
  Heavy chain

SEQ ID NO: 8568 - protein, 120 aa, Homo sapiens
  Heavy chain
QVQLVESGGGVVQPGRSLRLSCAASGFTFSSYGMHWVRQAPGKGLEWVAVIWYDGNNKHYADSVKGRFTISRDNSKNTLYLQMNSLRAEDTAVYYCARGDMLTGYYGYWGQGTLVAVSSA

SEQ ID NO: 8569 - protein, 119 aa, Homo sapiens
  Heavy chain
QVQLVESGGGVVQPGRSLRLSCAASGFTFSRFGVNWVRQAPGKGLEWVAVIWYDGSNKYYADSVKGRFTISRDNSKNTLFLQMNSLRAEDTAVYYCARVHQLGPFDSWGQGTLVTVSSA

SEQ ID NO: 8570 - protein, 119 aa, Homo sapiens; identical to SEQ ID NO: 8545
  Heavy chain

SEQ ID NO: 8571 - protein, 120 aa, Homo sapiens; identical to SEQ ID NO: 8542
  Heavy chain

SEQ ID NO: 8572 - protein, 120 aa, Homo sapiens
  Heavy chain
QVQLVESGGGVVQPGRSLRLSCAASGFTFSSYGMHWVRQAPGKGLEWVAVIWYDGNNKHYADSVKGRFTISRDNSKNTLYLQMNSLRAEDTAVYYCARGDILTGYYGSWGQGTLVAVSSA

SEQ ID NO: 8573 - protein, 119 aa, Homo sapiens
  Heavy chain
QVQLVESGGGVVQPGRSLRLSCAASGFTFRSFGMHWVRQAPGKGLEWVAAVWYDGSNKYFADSVKGRFTITRDNSKNTLYLQMNSLRAEDTAVYYCARGGHLGHFDYWGQGTLVTVSSA

SEQ ID NO: 8574 - protein, 120 aa, Homo sapiens; identical to SEQ ID NO: 8543
  Heavy chain

SEQ ID NO: 8575 - protein, 119 aa, Homo sapiens; identical to SEQ ID NO: 8544
  Heavy chain

SEQ ID NO: 8576 - protein, 119 aa, Homo sapiens
  Heavy chain
QVQLVESGGGVVQPGRSLRLSCAASGFTFSSYGMHWVRQAPGKGLEWVAVIWYDGSNKYYADSVKGRFTISRDNSKNTLYLQMNSLRAEDTAVYYCARGAILTGFDYWGQGTLVTVSSA

SEQ ID NO: 8577 - protein, 119 aa, Homo sapiens
  Heavy chain
QVQLVESGGGVVQPGRSLRLSCAASGFTFSSYGMHWVRQAPGKGLEWVAFIWDDGRNKYYADSVKGRFTISRDNSKNTLFLQMNSLRAEDTAVYYCARKGQLGPFDYWGQGTLVTVSSA

SEQ ID NO: 8578 - protein, 120 aa, Homo sapiens
  Heavy chain
QVQLVESGGGVVQPGRSLRLSCAASGFTFSSYGMHWVRQAPGKGLEWVAVIWYDGSNKYYADSVKGRFTISRDNSKNTLYLQMNSLRAEDTAVYYCARRSSSWYYFDYWGQGTLVTVSSA

SEQ ID NO: 8579 - protein, 122 aa, Homo sapiens
  Heavy chain
QVQLVESGGGVVQPGRSLRLSCAASGITFSSYGMHWVRQAPGKGLEWVAVIWYDGSNKYYADSVKGRFTISRDNSKNTLYLQMNSLRAEDTAVYYCAREGGSGWYEYLDLWGRGTLVTVSSA

SEQ ID NO: 8580 - protein, 119 aa, Homo sapiens; identical to SEQ ID NO: 8577
  Heavy chain

SEQ ID NO: 8581 - protein, 119 aa, Homo sapiens
  Heavy chain
QVQLVESGGGVVQPGRSLRLSCAASGFTFSSYGMHWVRQAPGKGLEWVAALWYDGSNKYYADSVKGRFTISRDNSKNTLYLQMNSLRAEDTAVYYCTRGDYFGFWDYWGQGTLVTVSSA

SEQ ID NO: 8582 - protein, 119 aa, Homo sapiens; identical to SEQ ID NO: 8577
  Heavy chain

SEQ ID NO: 8583 - protein, 125 aa, Homo sapiens
  Heavy chain
QLQLQESGPGLVKPSETLSLTCTVSGGSISSSSYYWGWIRQPPGKGLEWIGSIYYSGSTYYNPSLKSRVTISVDTSKNQFSLELSSVAAADTAVYYCARVSYYYGSGSYYFDYWGQGTLVTVSSA

SEQ ID NO: 8584 - protein, 129 aa, Homo sapiens
  Heavy chain
QLQLQESGPGLVKPSETLSLTCTVSGGSISSSSYYWGWIRQPPGKGLEWIGSIYYSGSTYYNPSLKSRVTISVDTSKNQFSLNLNSVTAADTAVYYCAGFYYGSGSRYYYYYYGMDVWGQGTTVTVSSA

SEQ ID NO: 8585 - protein, 122 aa, Homo sapiens
  Heavy chain
QVQLVESGGGVVQPGRSLRLSCAASGITFSSYGMHWVRQAPGKGLEWVAVIWYDGSNKYYADSVKGRFTISRDNSKNTLYLQMNSLRAEDTAVYYCAREGGSGWYEYIDLWGRGTLVTVSSA

SEQ ID NO: 8586 - protein, 119 aa, Homo sapiens
  Heavy chain
QVQLVESGGGVVQPGRSLRLSCAASGVTLSSYGMHWVRQAPGKGLEWVAVIWYDGRNKYYADSVKGRFTISRDNSKNTLYLQMNSLRAEDTAVYYCARVHQLGPFDYWGQGTLVTVSSA

SEQ ID NO: 8587 - protein, 120 aa, Homo sapiens; identical to SEQ ID NO: 8578
  Heavy chain

SEQ ID NO: 8588 - protein, 125 aa, Homo sapiens; identical to SEQ ID NO: 8583
  Heavy chain

SEQ ID NO: 8589 - protein, 119 aa, Homo sapiens
  Heavy chain
QVQLVESGRGIVQPGRSLRLSCAASGFTFSSYGMHWVRQSPGKGLDWVAFIWDDGINKYYADSVKGRFTISRDNSKNTLYLQMNSLRAEDTAVYYCARKGQLGSFDYWGQGTLVTVSSA

SEQ ID NO: 8590 - protein, 120 aa, Homo sapiens; identical to SEQ ID NO: 8578
  Heavy chain

SEQ ID NO: 8591 - protein, 125 aa, Homo sapiens; identical to SEQ ID NO: 8583
  Heavy chain

SEQ ID NO: 8592 - protein, 120 aa, Homo sapiens
  Heavy chain
QVQLVESGGGVVQPGRSLRLSCAASGFTFSSYGMHWVRQAPGKGLEWVAVIWYDGSNKYYADSVKGRFTISRDNSKNTLYLQMNSLRAEDTAVYYCARRSSSWYYFYYWGQGTLVTVSSA

SEQ ID NO: 8593 - protein, 119 aa, Homo sapiens
  Heavy chain
QVQLVESGGGVVQPGRSLRLSCAASGFTFSSYGMHWVRQAPGKGLEWVAVIWYDGSNKYYADSVKGRFTISRDNSKNTLYLQMNSLRAEDTAVYYCARGAILTGFDSWGQGTLVTVSSA

SEQ ID NO: 8594 - protein, 125 aa, Homo sapiens; identical to SEQ ID NO: 8583
  Heavy chain

SEQ ID NO: 8595 - protein, 122 aa, Homo sapiens
  Heavy chain
QVQLVESGGGVVQPGRSLRLSCAASGITFSSYGMHWVRQAPGKGLEWVAVIWYDGSNKYYADSVKGRFTISRDNSKNTLYLQMNSLRAEDTAVYYCARDGGSGWYEYLDLWGRGTLVTVSSA

SEQ ID NO: 8596 - protein, 120 aa, Homo sapiens; identical to SEQ ID NO: 8578
  Heavy chain

SEQ ID NO: 8597 - protein, 120 aa, Homo sapiens; identical to SEQ ID NO: 8578
  Heavy chain

SEQ ID NO: 8598 - protein, 118 aa, Homo sapiens
  Heavy chain
QVQLVESGGGVVQPGRSLRLSCAASGFTFSSYNMHWVRQAPGKGLEWVAVIGYDGSDKYYADSVKGRFTISRDNSKNTLYLQMNSLRAEDTAVYYCAREKHWFFDLWGRGTLVTVSSA

SEQ ID NO: 8599 - protein, 125 aa, Homo sapiens; identical to SEQ ID NO: 8583
  Heavy chain

SEQ ID NO: 8600 - protein, 125 aa, Homo sapiens
  Heavy chain
QLQLQESGPGLVKPSETLSLTCTVSGGSISSSSYYWGWIRQPPGKGLEWIGSIYYSGSTYYNPSLKSRVTISVDTSKNQFSLELSSVAAADTAVYYCARVSYSYGSGSYYFDYWGQGTLVTVSSA

SEQ ID NO: 8601 - protein, 120 aa, Homo sapiens
  Heavy chain
QVQLVESGGGVVQPGRSLRLSCAASGFTFSSYGMHWVRQAPGKGLEWVAVIWYDGSNKYYADSVKGRFTISRDNSKNTLYLQMNSLRAEDTAVYYCARRSSGWYYFDYWGQGTLVTVSSA

SEQ ID NO: 8602 - protein, 121 aa, Homo sapiens
  Heavy chain
EVQLVESGGGLVQPGRSLRLSCTASGFTFGDYVVSWFRQAPGKGLEWVGFIRRKAYGGTTAYAASVKGRFSISRDDSKNIAYLQMNSLKTEDTAVYYCTRSGWYWYFDLWGRGTLVTVSSA

SEQ ID NO: 8603 - protein, 124 aa, Homo sapiens
  Heavy chain
EVQLVESGPGLVKPSETLSPTCTVSGGSISSYYWSWIRQPPGKGLEWIGYIYYSGSTNYNPSLKSRVTISVDTSKNQLSLKLSSVTAADTALYHCAREDNWRNYYYYYGMDVWGQGTTVTVSSA

SEQ ID NO: 8604 - protein, 125 aa, Homo sapiens; identical to SEQ ID NO: 8583
  Heavy chain

SEQ ID NO: 8605 - protein, 125 aa, Homo sapiens; identical to SEQ ID NO: 8583
  Heavy chain

SEQ ID NO: 8606 - protein, 119 aa, Homo sapiens
  Heavy chain
QVQLVESGGGVVQPGRSLRLSCAASGFTFSSYGMHWVRQAPGKGLEWVAVIWYDGSNKYYADSVKGRFTISRDNSKNTLYLQMNSLRAEDTAVYYCARGAIFTGFDYWGQGTLVTVSSA

SEQ ID NO: 8607 - protein, 129 aa, Homo sapiens; identical to SEQ ID NO: 8584
  Heavy chain

SEQ ID NO: 8608 - protein, 125 aa, Homo sapiens; identical to SEQ ID NO: 8583
  Heavy chain

SEQ ID NO: 8609 - protein, 119 aa, Homo sapiens; identical to SEQ ID NO: 8577
  Heavy chain

SEQ ID NO: 8610 - protein, 119 aa, Homo sapiens
  Heavy chain
QVQLVESGGGVVQPGRSLRLSCAASGFTFSSYGMHWVRQAPGKGLEWVAVIWYDGSNKYYADSVKGRFTISRDNSKNTLYLQMNSLRAEDTAVYYCARGAILTGFDVWGQGTTVTVSSA

SEQ ID NO: 8611 - protein, 120 aa, Homo sapiens
  Heavy chain
QVQLVESGGGVVQPGRSLRLSCAASGFTFSSYGMHWVRQAPGKGLEWVAVIWYDGSNKYYADSVKGRFTISRDNSKNTLYLQMNSLRAEDTAVYYCARGSSRYWYFDLWGRGTLVTVSSA

SEQ ID NO: 8612 - protein, 120 aa, Homo sapiens; identical to SEQ ID NO: 8578
  Heavy chain

SEQ ID NO: 8613 - protein, 120 aa, Homo sapiens; identical to SEQ ID NO: 8601
  Heavy chain

SEQ ID NO: 8614 - protein, 125 aa, Homo sapiens; identical to SEQ ID NO: 8583
  Heavy chain

SEQ ID NO: 8615 - protein, 119 aa, Homo sapiens
  Heavy chain
QVQLVESGRGIVQPGRSLRLSCAASGFTFSSYGMHWVRQSPGKGLDWVAFIWDDGKNKYYADSVKGRFTISRDNSKNTLYLQMNSLRAEDTAVYYCARKGQLGPFDSWGQGTLVTVSSA

SEQ ID NO: 8616 - protein, 120 aa, Homo sapiens; identical to SEQ ID NO: 8578
  Heavy chain

SEQ ID NO: 8617 - protein, 119 aa, Homo sapiens; identical to SEQ ID NO: 8615
  Heavy chain

SEQ ID NO: 8618 - protein, 125 aa, Homo sapiens; identical to SEQ ID NO: 8600
  Heavy chain

SEQ ID NO: 8619 - protein, 120 aa, Homo sapiens; identical to SEQ ID NO: 8578
  Heavy chain

SEQ ID NO: 8620 - protein, 120 aa, Homo sapiens; identical to SEQ ID NO: 8578
  Heavy chain

SEQ ID NO: 8621 - protein, 125 aa, Homo sapiens; identical to SEQ ID NO: 8583
  Heavy chain

SEQ ID NO: 8622 - protein, 129 aa, Homo sapiens; identical to SEQ ID NO: 8584
  Heavy chain

SEQ ID NO: 8623 - protein, 119 aa, Homo sapiens
  Heavy chain
QVQLVESGGGVVQPGRSLRLSCAASGFTFSSYGMHWVRQAPGKGLEWVAFIWDDGRNKYYADSVKGRFTISRDNSKNTLFLQMNSLRAEDTAVYYCARNGQLGPFDYWGQGTLVTVSSA

SEQ ID NO: 8624 - protein, 130 aa, Homo sapiens
  Heavy chain
QLQLQESGPGLVKPSETLSLTCTVSGGSISSSSYYWGWIRQPPGKGLEWIGSIYYSGSTYYNPSLKSRVTISVDTSKNQFSLKLSSVTAADTAVYYCAGYYYGSGSPLYYYYYYGMDVWGQGTTVTVSSA

SEQ ID NO: 8625 - protein, 119 aa, Homo sapiens; identical to SEQ ID NO: 8577
  Heavy chain

SEQ ID NO: 8626 - protein, 120 aa, Homo sapiens; identical to SEQ ID NO: 8578
  Heavy chain

SEQ ID NO: 8627 - protein, 119 aa, Homo sapiens
  Heavy chain
QVQLVESGGGVVQPGRSLRLSCAASGFTFSSYGIHWVRQAPGKGLEWVAVIWYDGRNKYYADSVKGRFTISRDNSKNTLYLQMNSLRAEDTAVYYCARAGNWGPFDYWGQGTLVTVSSA

SEQ ID NO: 8628 - protein, 119 aa, Homo sapiens
  Heavy chain
EVQLVESGGGVVRPGGSLRLSCAASGFTFDDYGMSWVRQAPGKGLEWVSGINWNGGSTGYADSVKGRFAISRDNAKNSLYLQMNSLRAEDTALYHCVRDGWELLGDYWGQGTLVTVSSA

SEQ ID NO: 8629 - protein, 119 aa, Homo sapiens
  Heavy chain
EVQLVESGGGVVRPGGSLRLSCAASGFTFDDYGMSWVRQAPGKGLEWVSGINWNGGSTGYVDSVKGRFIISRDNAKNSLYLQMNSLRAEDTALYYCARDGWKLLDDYWGQGTLVTVSSA

SEQ ID NO: 8630 - protein, 117 aa, Homo sapiens
  Heavy chain
QVQLVQSGAEEKKPGAAVKVSCKASGYTFTSYGISWVRQAPGQGLEWMGWISAYNGNTHYAQKFQGRVTMTTDTSTSTAYMELRSLRSDDTAVYYCARVGPPFDYWGQGTLVTVSSA

SEQ ID NO: 8631 - protein, 119 aa, Homo sapiens
  Heavy chain
EVQLVESGGYVVRPGGSLRLSCAASGFAFDDFGMSWVRQPPGKGLEWVSGINWNGGNTGYVDSVKGRFIISRDNAKNSLYLQMNSLRAEDTALYYCVRDGWKLLDDYWGQGTLVTVSSA

SEQ ID NO: 8632 - protein, 119 aa, Homo sapiens
  Heavy chain
QVQLVQSGAEVKKPGASVKVSCKASGYTFTSYGISWVRQAPGQGLEWMGWISAYNGNTNYAQKLQGRVTMTTDTSTSTAYMELRSLRSDDTAVYYCARITGPYAFDIWGQGTKVTVSSA

SEQ ID NO: 8633 - protein, 118 aa, Homo sapiens
  Heavy chain
QVQLVQSGAEVKKPGASVKVSCKASGYTFTSYGISWVRQAPGQGLEWMGWISVYNGNTNYAQKLQGRVTMTTDTSTSTAYMELRSLRSDDTAVYYCARVGANWFDPWGQGTLVTVSSA

SEQ ID NO: 8634 - protein, 119 aa, Homo sapiens
  Heavy chain
QVQLVESGGGVVQPGRSLRLSCAASGFTFSSHGMDWVRQAPGKGLEWVAVIWYDGRNKYYADSVKGRFTISRDNSKNTLYLQMNSLRVEDTAVYYCARGGLIGGFDYWGQGTLVTVSSA

SEQ ID NO: 8635 - protein, 119 aa, Homo sapiens
  Heavy chain
QVQLVESGGGVVQPGRSLRLSCTASGFTFSSYGMDWVRQAPGKGLEWVAVIWYDGRNKYYADSVKGRFTISGDSSKNTLYLQMNSLRAEDTAVYYCARGGLLGGFDYWGQGTLVTVSSA

SEQ ID NO: 8636 - protein, 124 aa, Homo sapiens
  Heavy chain
QVQLVQSGAEVQKPGASVKVSCKASGYTFTSYYMHWVRQAPGQGLEWMGIINPSGGSSNYAQKFLGRVTMTRDTSTSTVYMELSGLRSEDTAVYYCARDPPITMVRGAPFDYWGQGTLVTVSSA

SEQ ID NO: 8637 - protein, 121 aa, Homo sapiens
  Heavy chain
QVQLVESGGGVVQPGRSLRLSCAASGFTFRGYGMHWVRQAPGKGLEWVAVIWNDGSNKYYADSVKGRFTISRDNSKNTLYLQMNSLRAEDTAVYYCARTYNWNDVGWDYWGQGTLVTVSSA

SEQ ID NO: 8638 - protein, 119 aa, Homo sapiens; identical to SEQ ID NO: 8635
  Heavy chain

SEQ ID NO: 8639 - protein, 124 aa, Homo sapiens; identical to SEQ ID NO: 8636
  Heavy chain

SEQ ID NO: 8640 - protein, 119 aa, Homo sapiens
  Heavy chain
QVQLVESGGGVVQPGRSLRLSCAASGFTFSSYGIHWVRQAPGKGLEWVAVILYDGSNKFYADSVKGRFTISRDNSKNTLYLQMNSLRAEDTAVYYCARGGLTGPFDYWGQGTLVTVSSA

SEQ ID NO: 8641 - protein, 119 aa, Homo sapiens
  Heavy chain
QVQLVESGGGVVQPGRSLRLSCAASGFTFSSYGIHWVRQAPGKGLEWVAVIWYDGSNKFYADSVKGRFTISRDTSKNTLYLQMNSLRAEDTAVYYCARGGIWGYFDYWGQGTLVTVSSA

SEQ ID NO: 8642 - protein, 119 aa, Homo sapiens
  Heavy chain
QVQLVESGGGVVQPGRSLRLSCAASGFTFNSYGMHWVRQAPGKGLEWVAVIWYDGSNKHYADSVEGRFTISRDNSKNTLYLQMNSLRAEDTAVYYCVRGGIWGYFDYWGQGTLVTVSSA

SEQ ID NO: 8643 - protein, 119 aa, Homo sapiens
  Heavy chain
QVQLVESGGGVVQPGRSLRLSCAASGFTFSNYGMHWVRQAPGKGLEWVAVIFYDGSNKYYADSVKGRFTISRDNSKNTLYLQMNSLRAEDTAVYYCARVGLLGGMDVWGQGTTVTVSSA

SEQ ID NO: 8644 - protein, 118 aa, Homo sapiens
  Heavy chain
QVQLVQSGPEVKKPGASVKVSCKASGYTFTNYGIGWVRQAPGQGLEWMGWISAYNGNTNYVQKFQGRVTMTTDPSTSTAYMALRSLRSDDTAVYYCARVGASGVDYWGQGTLVTVSSA

SEQ ID NO: 8645 - protein, 119 aa, Homo sapiens; identical to SEQ ID NO: 8627
  Heavy chain

SEQ ID NO: 8646 - protein, 118 aa, Homo sapiens
  Heavy chain
QVQLVQSGPEVKKPGASVKVSCKASGYTFTSYGIGWVRQAPGQGLEWMGWISAYNGNTNYVQKFQGRVTMTTDTSTNTAYMELRSPRSDDTAVYYCARVGSSGVDYWGQGTLVTVSSA

SEQ ID NO: 8647 - protein, 120 aa, Homo sapiens
  Heavy chain
QVQLVQSGAEVKKPGASVKVSCKASGYTFTNYGISWVRQAPGQGLEWMGWISAYNGNTNYAQKFQGRVTMTTDTSTSTAYMELRSLRSDDTAVYYCARGPSGPYEGDYWGQGTLVTVSSA

SEQ ID NO: 8648 - protein, 119 aa, Homo sapiens
  Heavy chain
QVQLVESGGGVVQPGRSLRISCAASGFTFSSYGIHWVRQAPGKGLEWVAVIWYDGRNKHYADSVKGRFTISRDNSKNTLYLQMNSLRAEDTAVYYCARAGILGGMDVWGQGTTVTVSSA

SEQ ID NO: 8649 - protein, 119 aa, Homo sapiens
  Heavy chain
EVQLVESGGGVVRPGGSLRLSCAASGFSFDDFGMSWVRQAPGKGLEWVSGINWNGGSTGYADSVKGRFTISRDNAKNSLYLQMNSLRAEDTALYHCTRDGWRLLDDYWGQGTLVTVSSA

SEQ ID NO: 8650 - protein, 119 aa, Homo sapiens; identical to SEQ ID NO: 8628
  Heavy chain

SEQ ID NO: 8651 - protein, 117 aa, Homo sapiens
  Heavy chain
EVQLVESGGDLVKPGGSLRLSCAASGFTFSYAWMSWVRQAPGKGLEWIGRIKSKTDGGTIDYAAPVKDRFIISRDDSKNTLYLQMNSLKTEDSAVYYCTEERMDYWGQGTLVTVSSA

SEQ ID NO: 8652 - protein, 121 aa, Homo sapiens
  Heavy chain
QVQLVESGGGVVQPGGSLRLSCAASGFTFRGYGMHWVRQAPGKGLEWVAIIWNDGSNRYYADSVKGRFTISRDNSKNTLYLQMNSLRAEDTAVYYCTRTYTWNDVGWDYWGQGTLVTVSSA

SEQ ID NO: 8653 - protein, 119 aa, Homo sapiens
  Heavy chain
QVQLVESGGGVVQPGRSLRLSCAASGFTFSSYGIHWVRQAPGKGLEWVAVIWYDGSNKHYADSVRGRFTISRDNSKNTLYLQMNSLRAEDTAIYYCARAGIWGPFDYWGQGTLVTVSSA

SEQ ID NO: 8654 - protein, 121 aa, Homo sapiens
  Heavy chain
QVQLVESGGGVVQPGRSLRLSCSASGFTFRGYGMHWVRQAPGKGLEWVAIIWNDGSNKYYADSVKGRFTISRDNSKNTLYLQMNSLRAEDTAVYYCARTYTWNDVGWDYWGQGTLVTVSSA

SEQ ID NO: 8655 - protein, 119 aa, Homo sapiens
  Heavy chain
EVQLVESGGGVVRPGGSLRLSCAASGFSFDDYGMSWVRQAPGKGLEWVSGINWNGGSTGYADSVKGRFTVSRDNAKKSLYLQMNSLRAEDTALYYCARDGWRLLDDYWGQGTLVTVSSA

SEQ ID NO: 8656 - protein, 121 aa, Homo sapiens; identical to SEQ ID NO: 8637
  Heavy chain

SEQ ID NO: 8657 - protein, 119 aa, Homo sapiens
  Heavy chain
QVQLVESGGGVVQPGRSLRLSCAASGFTFSSFGMHWVRQAPGKGLEWVAVIWYDGSNRFYADSVKGRFTLSRDNSKNTLFLQMNSLRAEDTAVYYCARGGHYGPFDYWGQGTLVTVSSA

SEQ ID NO: 8658 - protein, 121 aa, Homo sapiens; identical to SEQ ID NO: 8654
  Heavy chain

SEQ ID NO: 8659 - protein, 119 aa, Homo sapiens; identical to SEQ ID NO: 8648
  Heavy chain

SEQ ID NO: 8660 - protein, 129 aa, Homo sapiens
  Heavy chain
QVQLVESGGGVVQPGRSRRLSCAASGFMFSSYGMHWVRQAPGKGLEWVAVIWYDGTIKYYADSVQGRFTISRDNSKNTLYLQMNSLRAEDTAVYYCARKGDTSNGSGSHYNEGFFDIWGQGTMVTVSLA

SEQ ID NO: 8661 - protein, 119 aa, Homo sapiens; identical to SEQ ID NO: 8635
  Heavy chain

SEQ ID NO: 8662 - protein, 119 aa, Homo sapiens; identical to SEQ ID NO: 8627
  Heavy chain

SEQ ID NO: 8663 - protein, 119 aa, Homo sapiens; identical to SEQ ID NO: 8627
  Heavy chain

SEQ ID NO: 8664 - protein, 119 aa, Homo sapiens
  Heavy chain
EVQLVESGGGVVRPGGSLRLSCAASGFTFDDYGMSWVRQVPGKGLEWVSGINWNGGSTGYADSVKGRFTISRDNAKNSLYLQMNSLRAEDTALYYCVRDGWRLLDDYWGQGTLVTVSSA

SEQ ID NO: 8665 - protein, 118 aa, Homo sapiens; identical to SEQ ID NO: 8633
  Heavy chain

SEQ ID NO: 8666 - protein, 119 aa, Homo sapiens
  Heavy chain
EVQLVESGGGVVRPGGSLRLSCAASGFTFDDYGMSWVRQAPGKGLEWVSGINWNGGSTGYADSVKGRFTISRDNAKNSLYLQMNSLRAEDTALYHCARDGWELLDDYWGQGTLVTVSSA

SEQ ID NO: 8667 - protein, 119 aa, Homo sapiens; identical to SEQ ID NO: 8635
  Heavy chain

SEQ ID NO: 8668 - protein, 119 aa, Homo sapiens; identical to SEQ ID NO: 8635
  Heavy chain

SEQ ID NO: 8669 - protein, 118 aa, Homo sapiens
  Heavy chain
QVQLVQSGAEVKKPGASVKVSCKASGYTFTSYGISWVRQAPGQGLEWMGWISAYNGNTNYVQKFQGRVTMTTDTSTSTAYMELRSLRSDDTAVYFCARLSRAGHDYWGQGTLVTVSSA

SEQ ID NO: 8670 - protein, 115 aa, Homo sapiens
  Heavy chain
QVQLVESGGGVVQPGRSLRLSCAASGFTFSSYGIHWVRQAPGKGLEWVAVIWYDGRNKYYADSVKGRFTISRDNSKNTLYLQMNSLRAEDTAVYYCARGGNWGPFDYWGQGTLVT

SEQ ID NO: 8671 - protein, 119 aa, Homo sapiens; identical to SEQ ID NO: 8627
  Heavy chain

SEQ ID NO: 8672 - protein, 119 aa, Homo sapiens
  Heavy chain
EVQLVESGGRVVRPGGSLRLSCAVSGFTFADYGMSWVRQAPGKGLEWVSGINWNGGTTGYADSVKGRFTISRDNAKNSLYLQMNSLRAEDTALYHCVRDGWELLDDYWGRGTLVTVSSA

SEQ ID NO: 8673 - protein, 119 aa, Homo sapiens
  Heavy chain
QVQLVESGGGVVQPGRSLRLSCAASGFTLSSYGMHWVRQAPGKGLEWVAVIWYDGSNKHYADSVKGRFTISRDNSKNTLYLQMNSLRAEDTAVYYCVRGGIWGNFDYWGQGTLVTVSSA

SEQ ID NO: 8674 - protein, 119 aa, Homo sapiens
  Heavy chain
QVQLVESGGGVVQPGRSLRLSCAASGFTFSSYGMHWVRQAPGKGLEWVAVIWYDGSNKHYADSVKGRFTISRDNYKKTVSLQVNSLRAEDTAVYYCARGGIWGYFDSWGQGTLVTVSSA

SEQ ID NO: 8675 - protein, 115 aa, Homo sapiens
  Heavy chain
QVQLVESGGGVVQPGRSLRLSCAASGFTFSSYGIHWVRQAPGKGLEWVAVIWYDGRNKYYADSVKGRFTISRDNSKNTLYLQMNSLRAEDTAVYYCARAGNWGPFDSWGQGTLVT

SEQ ID NO: 8676 - protein, 119 aa, Homo sapiens
  Heavy chain
EVQLVESGGGVVRPGGSLRLSCAASGFTFDDYGMSWVRQTPGKGLEWVSGINWNGGSTGYVDSVKGRFIISRDNAKNSLYLQMNSLRAEDTALYYCARDGWKLLDDYWGQGTLVTVSSA

SEQ ID NO: 8677 - protein, 119 aa, Homo sapiens
  Heavy chain
EVQLVESGGGVVRPGGSLRLSCAASGFTFDDYGMSWVRQAPGKGLEWVSGINWNGGSTGYADSVKGRFTISRDNAKNSLYLQMNSLRAEDTALYHCVRDGWELLGDYWGQGTLVTVSSA

SEQ ID NO: 8678 - protein, 119 aa, Homo sapiens
  Heavy chain
QVQLVESGGGVVQPGRSLRLSCAASGFTFSNHGMHWVRQAPGKGLEWVAVIWYDGSNKHYADSVMGRFILSRDNSKNTLYLQMNSLRAEDTAVYYCARGGIWGYFDYWGQGTLVTVSSA

SEQ ID NO: 8679 - protein, 118 aa, Homo sapiens
  Heavy chain
QVQLVQSGPEVKKPGASVKVSCKASGYTFTSYGIGWVRQAPGQGLEWMGWISAYNGNTNYVQKFQGRVTMTTDTSTSTAYMELRSLRSDDTAVYYCARVGASGVDYWGQGTLVTVSSA

SEQ ID NO: 8680 - protein, 117 aa, Homo sapiens; identical to SEQ ID NO: 8651
  Heavy chain

SEQ ID NO: 8681 - protein, 124 aa, Homo sapiens
  Heavy chain
QVQLVQSGAEVKKPGASVKVSCKASGYTFTSYYMHWVRQAPGQGLEWMGIVNPSGGTSIYAQKFQGRVTMTRDTSTSTVYMELSGLISEDTAVYYCARDPPITLVRGAPFDYWGQGTLVTVSSA

SEQ ID NO: 8682 - protein, 124 aa, Homo sapiens
  Heavy chain
QVQLVQSGAEVKKPGASVKVSCKASGYTFTSYYMHWVRQAPGQGLEWMGIVNPSSGSTNYAQKFQGRVTMTSDTSTSTVYMGLNSLRSEDTAVYYCARDPPITMVRGAPFDYWGQGTLVTVSSA

SEQ ID NO: 8683 - protein, 118 aa, Homo sapiens
  Heavy chain
QVQLVQSGAEVKKPGASVKVSCKASGYTFTSYGISWVRQAPGQGLEWMGWISVYNGNTNYAQKLQGRVTMTTDTSTSTAYMELRSLRSDDTAVYYCARVGANWFDPWGQGSLVTVSSA

SEQ ID NO: 8684 - protein, 119 aa, Homo sapiens; identical to SEQ ID NO: 8635
  Heavy chain

SEQ ID NO: 8685 - protein, 119 aa, Homo sapiens
  Heavy chain
QVQLVESGGGVVQPGRSLRLSCAASGFTFSSYGMHWVRQALGKGLEWVAVIFYDGSNNYYADSVKGRFTISRDNSKNTLYLQMDSLRADDTAVYYCARGGFFGPFDYWGQGTLVTVSSA

SEQ ID NO: 8686 - protein, 119 aa, Homo sapiens; identical to SEQ ID NO: 8631
  Heavy chain

SEQ ID NO: 8687 - protein, 124 aa, Homo sapiens; identical to SEQ ID NO: 8682
  Heavy chain

SEQ ID NO: 8688 - protein, 119 aa, Homo sapiens
  Heavy chain
EVQLVESGGGVVRPGGSLRLSCAASGFTFDDYGMSWVRQAPGKGLEWVSGINWNGGNTGYVDSVKGRFIISRDNAKNSLYLQMNSLRVEDTALYYCARDGWRLLDDYWGQGTQVTVSSS

SEQ ID NO: 8689 - protein, 122 aa, Homo sapiens
  Heavy chain
QVQLVQSGAEVKKPGASVKVSCKASGYTFTSYGINWVRQAPGQGLEWMGWISAYNGNTNYAQKLQGRVTMTTDTSTSTAYMELRSLRSDDTAVYYCARLYCSGGSCYSDYWGQGTLVTVSSA

SEQ ID NO: 8690 - protein, 124 aa, Homo sapiens
  Heavy chain
QVQLVQSGAEVKKPGASVKVSCKASGFTFTSYYIHWVRQAPGQGLEWMGIINPSGGSTISAQKFQGRVTMTSDTSTSTVSMELSSLRSDDTAVYYCARDPPITMVRDAPFDYWGQGTLVTVSSA

SEQ ID NO: 8691 - protein, 121 aa, Homo sapiens; identical to SEQ ID NO: 8652
  Heavy chain

SEQ ID NO: 8692 - protein, 129 aa, Homo sapiens
  Heavy chain
QVQLVESGGGVVQPGRSLRLSCAASGFTFSSYGMHWVRQAPGKGLEWVAVIWYDGNHKYYADSVQGRFTISRDNSKNTLYLQMNSLGAEDTAVYYCARKGDNSYGSGSYYNEGFFDMWGQGTMVTVSSA

SEQ ID NO: 8693 - protein, 119 aa, Homo sapiens
  Heavy chain
QVQLVESGGGVVQPGRSLRLSCAASGFTFSSYGMHWVRQAPGKGLEWVAVIWYDGRNKFYADSVKGRFTISRDNSKNTLYLQMNSLRAEDTAVYYCARVGLLGGMDVWGQGTTVTVSSA

SEQ ID NO: 8694 - protein, 119 aa, Homo sapiens; identical to SEQ ID NO: 8677
  Heavy chain

SEQ ID NO: 8695 - protein, 119 aa, Homo sapiens; identical to SEQ ID NO: 8631
  Heavy chain

SEQ ID NO: 8696 - protein, 129 aa, Homo sapiens
  Heavy chain
QVQLVESGGGVVQPGRSRRLSCAASGFMFSSYGMHWVRQAPGKGLEWVAVIWYDGTIKYYADSVQGRFTISRDNSKNTLYLQMNSLRAEDTAMYYCARKGDTSNGSGSHYNEGFFDIWGQGTMVTVSLA

SEQ ID NO: 8697 - protein, 119 aa, Homo sapiens
  Heavy chain
QVQLVESGGGVVQPGRSLRLSCAASGFTLSSHGMHWVRQAPGKGLEWVAVTWYDGSNKHYADSVKGRFTISRDNSKNTLYLQMNSLRVEDTAVYYCARGGLLGATDYWGQGTLVTVSSA

SEQ ID NO: 8698 - protein, 119 aa, Homo sapiens; identical to SEQ ID NO: 8688
  Heavy chain

SEQ ID NO: 8699 - protein, 119 aa, Homo sapiens
  Heavy chain
QVQLVESGGGVVQPGRSLRLSCAASGFTFSSHGMDWVRQAPGKGLEWVAVIWYDGRNKYYADSVKGRFTISRDNSKNTLYLQMNSLRVEDTAVYYCARGGLIGGFDFWGQGTLVTVSSA

SEQ ID NO: 8700 - protein, 124 aa, Homo sapiens
  Heavy chain
QVQLVQSGAEVQKPGASVKVSCKASGYTFTSYYMHWVRQAPGQGLEWMGIINPSGGSSNYAQKFLDRLTMTRDTSTSTVYMELSGLRSEDTAVYYCARDPPITMFRGAPFDYWGQGTLVTVSSA

SEQ ID NO: 8701 - protein, 119 aa, Homo sapiens
  Heavy chain
QVQLVESGGGVVQPGRSLRLSCAASGFTFSSYGIHWVRQAPGKGLEWVAVIWYDGRNKYYADSVKGRFTMSRDNSKNTLYLQMNSLRAEDTAVYFCARVGLLGAMDVWGQGTTVTVSSA

SEQ ID NO: 8702 - protein, 119 aa, Homo sapiens
  Heavy chain
QVQLVESGGGVVQPGRSLRLSCAASGFTFSSHGMDWVRQAPGKGLEWVAVIWYDGRNKYYADSVKGRFTISRDNSKNTLYLQMNSLRVEDTAVYYCARGGLIGGFDHWGQGTLVTVSSA

SEQ ID NO: 8703 - protein, 119 aa, Homo sapiens
  Heavy chain
QVQLVESGGGVVQPGRSLRLSCAASGFTFSSYGMHWVRQAPGKGLEWVAVIWYDGNNKHYADAVRGRFTISRDNSKNTLYLQMNSLRAEDTAVYHCVRGGIWGYFDYWGQGTLVTVSSA

SEQ ID NO: 8704 - protein, 121 aa, Homo sapiens
  Heavy chain
QVQLVQSGAEVKKPGASVKVSCKASGYTFTNYGISWVRQAPGQGLEWMGWISAYNGNTNYAQKLQGRVTMTTDTSTSTAYMELRSLRSDDTAVYYCARKNGYDPNGFDPWGQGTLVTVSSA

SEQ ID NO: 8705 - protein, 119 aa, Homo sapiens; identical to SEQ ID NO: 8631
  Heavy chain

SEQ ID NO: 8706 - protein, 118 aa, Homo sapiens; identical to SEQ ID NO: 8683
  Heavy chain

SEQ ID NO: 8707 - protein, 119 aa, Homo sapiens; identical to SEQ ID NO: 8685
  Heavy chain

SEQ ID NO: 8708 - protein, 119 aa, Homo sapiens
  Heavy chain
QVQLVESGGGVVQPGRSLRLSCAASGFIFSSYGMHWVRQAPGKGLEWVAVIWYDGRNKHYADSVKGRFTISRDNSKNTLYLQMNSLRAEDTAVYYCARSGSLGAFDIWGQGTMVTVSSA

SEQ ID NO: 8709 - protein, 119 aa, Homo sapiens
  Heavy chain
EVQLVESGGGVVRPGGSLRLSCAASGFIFEDYGMSWVRQTPGKGVEWVSGINWNGGNTGYADSVKGRFTISRDNAKSFLYLQMNGLRAEDTALYYCARDGWKLLDDYWGQGTLVTVSSA

SEQ ID NO: 8710 - protein, 119 aa, Homo sapiens
  Heavy chain
EVQLVESGGGVVRPGGSLRLSCAASGFTFDDYGMSWVRQAPGKGLEWVSGINWNGGSTGYVDSVKGRFIISRDNAKNSLYLQMNSLRAEDTALYYCARDGWRLLDDYWGQGTLVTVSSA

SEQ ID NO: 8711 - protein, 124 aa, Homo sapiens
  Heavy chain
QVQLVQSGAEVKKPGASVKVSCKSSGYTFTSYYMHWVRQAPGQGLEWMGIINPSSGGSTYAQKFQGRVTMTRDTSTSTVYMELSVLRSEDTAVYYCARDPPITMVRGAPFDYWGQGTLVTVSSA

SEQ ID NO: 8712 - protein, 119 aa, Homo sapiens
  Heavy chain
QVQLVESGGGVVQPGRSLRLSCAASGFTFSSYGMHWVRQAPGKGLEWVAVIWYDGNNKHYAVSVKGRFTISRDISTNTLYLQMNSLRAEDTAVYYCARGGLLGGFDYWGQGTLVTVSSA

SEQ ID NO: 8713 - protein, 121 aa, Homo sapiens; identical to SEQ ID NO: 8637
  Heavy chain

SEQ ID NO: 8714 - protein, 119 aa, Homo sapiens
  Heavy chain
QVQLVESGGGVVQPGRSLRLSCAASGFTFSNFGIHWVRQAPGKGLEWVAVIWYDGRNKHYADSVEGRFTITRDNSNNTLYLQMNSLRAEDTAVYYCARQGYMGSLDYWGQGILVTVSSA

SEQ ID NO: 8715 - protein, 118 aa, Homo sapiens
  Heavy chain
QVQLVQSGAEVKKPGASVKVSCKASGYTFTSYGISWVRQAPGQGLEWMGWISAYNGNTNYAQKLQGRVTMTTDTSTSTAYMELRSLRSDDTAVYYCARVGANWFDPWGQGTLVTVSSA

SEQ ID NO: 8716 - protein, 119 aa, Homo sapiens; identical to SEQ ID NO: 8712
  Heavy chain

SEQ ID NO: 8717 - protein, 119 aa, Homo sapiens
  Heavy chain
EVQLVESGGGVVRPGGSLRLSCAASGFTFDDYGMSWVRQAPGKGLEWVSGINWNGGSTGYVDSVKGRFAISRDNAKNSLYLQMNSLRAEDTALYHCVRDGWELLGDYWGQGTLVTVSSA

SEQ ID NO: 8718 - protein, 119 aa, Homo sapiens
  Heavy chain
EVQLVESEGGVVRPGGSLRLSCAASGFTFDDYGMSWVRQAPGKGLEWVSGINWNGGSTGYADSVKGRFTISRDNAKNSLYLQMNSLRAEDTALYHCARDGWELLDDYWGRGTLVTVSSA

SEQ ID NO: 8719 - protein, 119 aa, Homo sapiens; identical to SEQ ID NO: 8709
  Heavy chain

SEQ ID NO: 8720 - protein, 119 aa, Homo sapiens
  Heavy chain
EVQLVESGGGVVRPGGSLRLSCAASGFTFDDYGMSWVRQAPGKGLEWVSGINWNGGSTGYADSVKGRFTISRDNAKNSLYLQMNSLRAEDTALYHCMRDGWELLGDFWGQGTLVTVSSA

SEQ ID NO: 8721 - protein, 118 aa, Homo sapiens
  Heavy chain
QVQLVQSGAEVKKPGASVKVSCKASGYTFTSYGVTWVRQAPGQGLECMGWISAYNGNTNYAQKLQGRVTMTTDTSTNTAYMELRSLRSDDTAVYYCARKSPWGFDYWGQGTLVTVSSA

SEQ ID NO: 8722 - protein, 119 aa, Homo sapiens; identical to SEQ ID NO: 8709
  Heavy chain

SEQ ID NO: 8723 - protein, 119 aa, Homo sapiens; identical to SEQ ID NO: 8709
  Heavy chain

SEQ ID NO: 8724 - protein, 119 aa, Homo sapiens
  Heavy chain
EVQLVESGGGVVRPGGSLRLSCAASGFIFEDYGMSWVRQTPGKGVEWVSGINWNGGNTGYADSVKGRFTISRDNAKSFLYLQMNGLRAEDTALYYCARDGWKRLDDYWGQGTLVTVSSA

SEQ ID NO: 8725 - protein, 119 aa, Homo sapiens
  Heavy chain
EVQLVESGGGVVRPGGSLRLSCAASGFTFDDYGMSWVRQAPGKGLEWVSGINWNGASTGYVDSVKGRFIISRDNAKNSLYLQMNSLRVEDTALYYCARDGWKLLDDSWGQGTLVTVSSA

SEQ ID NO: 8726 - protein, 119 aa, Homo sapiens; identical to SEQ ID NO: 8709
  Heavy chain

SEQ ID NO: 8727 - protein, 121 aa, Homo sapiens
  Heavy chain
QVQLVESGGGVVQPGGSLRLSCAASGFTLRGYGMHWVRQAPGKGLEWVAVIWNDGSNKYYADSVKGRFTISRDNSKNTLYLQMNSLRAEDTAVYYCARTYTWNDVGWDYWGQGTLVTVSSA

SEQ ID NO: 8728 - protein, 119 aa, Homo sapiens
  Heavy chain
EVQLVESGGGVVRPGGSLRLSCAASGFIFEDYGMSWVRQTPGKGVEWVSGINWNGGNTGYADSVKGRFTISRDNAKSFLYLQMNGLRAEDTALYYCARDGWNLLDDYWGQGTLVTVSSA

SEQ ID NO: 8729 - protein, 118 aa, Homo sapiens
  Heavy chain
QVQLVQSGTDVKKPGASVKVSCKASGYTFTSYGITWVRQAPGQGLECMGWISVYNGNTNYAQKLQDRVTMTTDTSTSTAYMELRSLRSDDTAVYYCARKNRWGFDYWGQGTQVTVSSA

SEQ ID NO: 8730 - protein, 115 aa, Homo sapiens
  Heavy chain
EVQLVESGGGVVRPGGSLRLSCAASGFTFDDYGMSWVRQAPGKGLEWVSGINWNGGSTGYADSVKGRFTISRDNAKNSLYLQMNSLRAEDTALYHCARDGWKLRDDYWGQGTLVT

SEQ ID NO: 8731 - protein, 129 aa, Homo sapiens
  Heavy chain
QVQLVESGGGVVQPGNSLRVSCAASGFIFSSYGMHWVRQAPGKGLEWVAVIWYDGGIKYYADSVKGRFTISRDNSKNTLYLQMTSLRAEDTAVYYCARKGDNSYGSGSHYNEGFFDIWGQGTMVTVSSA

SEQ ID NO: 8732 - protein, 120 aa, Homo sapiens
  Heavy chain
QVQLVQSGAEVKKPGASVKVSCKASGYTFTNYGISWVRQAPGQGLEWMGWISAYNGNTNFAQKFQGRVTMTTDTSTSTAYMELRSLRSDDTAVYYCARGPSGPYEGDYWGQGTLVTVSSA

SEQ ID NO: 8733 - protein, 119 aa, Homo sapiens
  Heavy chain
EVQLVESGGGVVRPGGSLRLSCAASGFIFEDYGMSWVRQTPGKGVEWVSGINWNGGNTGYADSVKGRFTISRDNAKSFLYLQMNGLRAEDTALYYCVRDGWKLLDDYWGQGTLVTVSSA

SEQ ID NO: 8734 - protein, 118 aa, Homo sapiens
  Heavy chain
QVQLVQSGAEVKKPGASVKVSCKASGYTFTSYGISWVRQAPGQGLEWMGWISAYNGNTNYAQKLQGRVTMTTDTSTNTAYMELRSLRSDDTAVYYCARVGANWFDPWGQGTLVTVSSA

SEQ ID NO: 8735 - protein, 119 aa, Homo sapiens
  Heavy chain
QVQLVESGGGVVQPGRSLRLSCAASGFTFSSHGMHWVRQAPGKGLEWVAVTWYDGSNKHYADSVKGRATISRDNSKNTLYLQMNSLRAEDTAVYYCTRGELLGYFDYWGQGTLVTVSSA

SEQ ID NO: 8736 - protein, 119 aa, Homo sapiens
  Heavy chain
QVQLVQSGAEVKKPGASVKVSCKASGYTFNSYGISWVRQAPGQGLEWMGWISAYNGNTNYAQKLQGRVTMTTDTSTSTAYMELRSLRSDDTAVYFCARVGRHLAFAYWGQGTLVTVSSA

SEQ ID NO: 8737 - protein, 119 aa, Homo sapiens
  Heavy chain
QVQLVESGGGVVQPGRSLRVSCAASGFIFSSYGIHWVRQAPGKGLEWVAVIWYDGSNKHYADSVKGRFTISRDNSKNTLYLQMNSLRADDTAVYYCARGHLLGYFDYWGQGTLVTVSSA

SEQ ID NO: 8738 - protein, 119 aa, Homo sapiens
  Heavy chain
QVQLVESGGGVVQPGRSLRLSCAASGFTFSSYGVHWVRQAPGKGLEWVSVILYDGNNKFYADSVKGRFTISRDNSKNTLYLQMNSLRAEDTAVYFCARGALLGAFDIWGRGTMVTVSSA

SEQ ID NO: 8739 - protein, 119 aa, Homo sapiens
  Heavy chain
QVQLVESGGGVVQPGRSLRLSCAASGFTFSSHGMHWVRQAPGKGLEWVAVIWYDGSNKHYADSVKGRFTISRDNSKNTLYLQMNSLRAEGTAVYYCARGGLMGGFDYWGQGTLVTVSSA

SEQ ID NO: 8740 - protein, 119 aa, Homo sapiens
  Heavy chain
QVQLVESGGGVVQPGRSLRLSCAASGFTFSSHGIHWVRQAPGKGLEWVAVIWYDGSNKHYGDSVKGRFTISRDNSKNTLYLQMNSLRAEDTAVYYCARGGYFGCFDHWGQGTLVTVSSA

SEQ ID NO: 8741 - protein, 122 aa, Homo sapiens
  Heavy chain
QVQLVESGGDVVQPGRSLRLSCAASGFTFSSHAMHWVRQAPGKGLEWVAVIWYDGNNKYYEDSVKGRFTISRDNSKNTLYLQMNSLRAEDTAVYYCAREKGIGWYEGMDVWGQGTTVTVSSA

SEQ ID NO: 8742 - protein, 119 aa, Homo sapiens
  Heavy chain
QVQLVESGGGVVQPGRSLRLSCAASGFTFSSYGMHWVRQAPGKGLEWVAAIWYDGNNKYYIDSVKGRFTISRDSSKNTLFLQMNSLRAEDTAVYYCARGGQLGYFDYWGQGTLVTVSSA

SEQ ID NO: 8743 - protein, 120 aa, Homo sapiens
  Heavy chain
QVQLQESGPGLVKPSETLSLTCTVSGGSISSYYWSWIRQPPGKGLEWIGYIHYSGRTNYNPSLKSRVTITVDTSEKQFSLKVNSVTAADTAVYYCARGYRGSYGLFDYWGQGILVTVSSA

SEQ ID NO: 8744 - protein, 122 aa, Homo sapiens
  Heavy chain
QVQLVESGGDVVQPGRSLRISCAASGFTFSSHAMHWVRQAPGKGLEWVAVIWYDGNNKYYEDSVNGRFTISRDNSKNTLYLQMNSLRAEDTALYFCAKEKGIGWYEGMDVWGQGTTVTVSSA

SEQ ID NO: 8745 - protein, 119 aa, Homo sapiens
  Heavy chain
QVQLVQSGAEVKKPGASVKVSCKASGYTFTSYGISWVRQAPGQGLECMGWISAYNGNTNYAQKLQGRVTMTTDTSTSTAYMELRSLRSDDTAVYYCARVGRFGEFDYWGQGTLVTVSSA

SEQ ID NO: 8746 - protein, 119 aa, Homo sapiens
  Heavy chain
QVQLVESGGGVVQPGRSLRLSCAASGFTFSSHGMHWVRQAPGKGLEWVAVIWYDGSNKHYADSVKGRFTTSRDNSKNTLHLQMNSLRAEDTAVYYCTRGGYFGCFDYWGQGTLVTVSSA

SEQ ID NO: 8747 - protein, 119 aa, Homo sapiens
  Heavy chain
QVQLVESGGGVVQPGRSLRLSCAASGFTFSSYGMHWVRQAPGKGLEWVAVIWYDGSNKYYADSVKGRFTISRDNSKNTLYLQMNSLRAEDTAVYYCARGGYLGAFDIWGQGTMVTVSSA

SEQ ID NO: 8748 - protein, 119 aa, Homo sapiens
  Heavy chain
QVQLVESGGGVVQPGRSLRLSCAASGFTFSTHGMHWVRQAPGKGLEWVAVVWYDGSNKHYADSVKGRFTISRDNSKNTLYLQMNSLRVEDTAVYYCARGGYFGCFDYWGQGTLVTVSSA

SEQ ID NO: 8749 - protein, 119 aa, Homo sapiens; identical to SEQ ID NO: 8748
  Heavy chain

SEQ ID NO: 8750 - protein, 119 aa, Homo sapiens
  Heavy chain
QVQLVESGGGVVQPGRSLRLSCAASGFTFSSYGMHWVRQAPGKGLEWVAVIWYDGSNRYYADSVKGRFTISRDISKNTLYLQMNSLRAEDTAMYYCARGDLLGAFDIWGQGTMVTVSSA

SEQ ID NO: 8751 - protein, 119 aa, Homo sapiens; identical to SEQ ID NO: 8748
  Heavy chain

SEQ ID NO: 8752 - protein, 121 aa, Homo sapiens
  Heavy chain
QVQLVQSGAEVKKPGASVKVSCKASGYTFTSYGISWVRQAPGQGLEWMGWISAYNGNTNYAQKLQGRVTMTTDTSTSTAYMELRSLRSDDTAVYYCARLTGTTSHAFDIWGQGTMVTVSSA

SEQ ID NO: 8753 - protein, 117 aa, Homo sapiens
  Heavy chain
QVQLVQSGAEVKKPGASVKVSCKASGYTFTSYGITWVRQAPGQGLEWMGWISAYNGNTHYAQKFQGRVTMTTDTSTTTAYMELRSLRSDDTAVYYCARVGPSFDYWGQGALVTVSSA

SEQ ID NO: 8754 - protein, 118 aa, Homo sapiens
  Heavy chain
QVQLVQSGAEVKKPGASVKVSCKASGYTFTSYGISWVRQAPGQGLEWMGWISAYNGNTNYAQKLQGRVTMTTDTSTSTAYMELRSLRSDDTAVYYCARVGVNWFDPWGQGTLVTVSSA

SEQ ID NO: 8755 - protein, 121 aa, Homo sapiens
  Heavy chain
QVQLVQSGAEVKKPGASVKVSCKASGYTFTSYGISWVRQAPGQGLEWMGWISAYNGNTNYAQNLQGRVTMTTDTSTSTAYMELRSLRSDDTAVFYCARLTGATSHAFDIWGQGTMVTVSSA

SEQ ID NO: 8756 - protein, 118 aa, Homo sapiens
  Heavy chain
QVQLVQSGAEVKKPGASVKVSCKASGYTFTSYGISWVRQAPGQGLEWMGWISAYNGNTNYAQKLQGRVTMTTDTSTNTAYMELRSLRSDDTAVYYCVRVGANWFDPWGQGTLVTVSSA

SEQ ID NO: 8757 - protein, 119 aa, Homo sapiens
  Heavy chain
QVQLVESGGGVVQPGRSLRLSCAASGFTFSSYGMHWVRQAPGKGLEWVAVIWYDGRNKYYADSVKGRFTISRDNSKNTLDLQMNSLRAEDTAVYYCARNQPLGSFDYWGQGTLVTVSSA

SEQ ID NO: 8758 - protein, 119 aa, Homo sapiens
  Heavy chain
QVQLVESGGGVVQPGRSLRLSCAASGFTFSSYGIHWVRQAPGKGLEWVAVIWYDGSNKHYADSVKGRSTISRDNSKNTLYLQMNSLRAEDTAVYYCARGELLGYFDYWGQGTLVTVSSA

SEQ ID NO: 8759 - protein, 119 aa, Homo sapiens; identical to SEQ ID NO: 8740
  Heavy chain

SEQ ID NO: 8760 - protein, 118 aa, Homo sapiens; identical to SEQ ID NO: 8734
  Heavy chain

SEQ ID NO: 8761 - protein, 119 aa, Homo sapiens
  Heavy chain
QVQLVQSGAEVKKPGASVKVSCKASGYTFTNYGISWVRQAPGQGLEWMGWISAYNGNTNYAQKLQGRVTMTTDTSTSTAYMELRSLRSDDTAVYYCARVAGYDAFDIWGQGTMVTVSSA

SEQ ID NO: 8762 - protein, 118 aa, Homo sapiens; identical to SEQ ID NO: 8734
  Heavy chain

SEQ ID NO: 8763 - protein, 118 aa, Homo sapiens; identical to SEQ ID NO: 8734
  Heavy chain

SEQ ID NO: 8764 - protein, 119 aa, Homo sapiens; identical to SEQ ID NO: 8738
  Heavy chain

SEQ ID NO: 8765 - protein, 118 aa, Homo sapiens; identical to SEQ ID NO: 8734
  Heavy chain

SEQ ID NO: 8766 - protein, 119 aa, Homo sapiens; identical to SEQ ID NO: 8748
  Heavy chain

SEQ ID NO: 8767 - protein, 119 aa, Homo sapiens; identical to SEQ ID NO: 8735
  Heavy chain

SEQ ID NO: 8768 - protein, 125 aa, Homo sapiens
  Heavy chain
QVQLVQSGAEVKKPGASVKVSCKASGYTFTSYGINWVRQAPGQGLEWMGWISAYNGNTNYAQKLQGRVTMTTDTSTSTAYMELRSLRSDDTAVYYCARDPVTMVRGVHWYFDLWGRGTLVTVSSA

SEQ ID NO: 8769 - protein, 119 aa, Homo sapiens; identical to SEQ ID NO: 8735
  Heavy chain

SEQ ID NO: 8770 - protein, 119 aa, Homo sapiens; identical to SEQ ID NO: 8736
  Heavy chain

SEQ ID NO: 8771 - protein, 119 aa, Homo sapiens
  Heavy chain
QVQLVESGGGVVQPGRSLRLSCAASGFTFSSYGLHWVRQAPGKGLEWVAVIWYDGSNKHYADSVKGRFTISRDNAKNTLYLQMNSLRAEDTAVYYCARGALLGAFEIWGQGTMVTVSSA

SEQ ID NO: 8772 - protein, 119 aa, Homo sapiens
  Heavy chain
QVQLVESGGGVVQPGRSLRLSCAASGFTFSSYGIHWVRQAPGKGLEWVAVIWYDGSNKHYADSVKGRFTISRDNSKNTLYLQMNSLRAEDTAVYYCARGELLGYFDYWGQGTLVTVSSA

SEQ ID NO: 8773 - protein, 119 aa, Homo sapiens
  Heavy chain
QVQLVESGGGVVQPGRSLRLSCAASGFTFSSHGMHWVRQAPGKGLEWVAVIWYDGSNKHYADSVKGRFTTSRDNSKNTLHLQMNSLRAEDTAVYYCARGGYFGCFDYWGQGTLVTVSSA

SEQ ID NO: 8774 - protein, 119 aa, Homo sapiens; identical to SEQ ID NO: 8773
  Heavy chain

SEQ ID NO: 8775 - protein, 119 aa, Homo sapiens
  Heavy chain
QVQLVESGGGVVQPGRSLRLSCAASGFTFSSYGMHWVRQAPGKGLEWVAVIWYDGNNKYYADSVKGRFTFSRDNSKNTLYLQMNSLRAEDTAVYYCARGALLGGFDYWGQGTLVTVSSA

SEQ ID NO: 8776 - protein, 119 aa, Homo sapiens
  Heavy chain
QVQLVESGGGVVQPGRSLRLSCEASGFTFSSYGMHWVRQAPGKGLEWVAVIWYEGRNKHYADSVKGRFTISRDNSKNTLYMQMNSLRAEDTAVYYCARGGELGPFDYWGQGTLVTVSSA

SEQ ID NO: 8777 - protein, 119 aa, Homo sapiens
  Heavy chain
QVQLVESGGGVVQPGRSLRLSCAASGFTFSSYGTHWVRQAPGKGLEWVAVIWYDGSNKYYADSVKGRFTISRDNSKNTLYLQMNSLRAEDTAVYYCARAGNWGAFDIWGQGTMVTVSSA

SEQ ID NO: 8778 - protein, 119 aa, Homo sapiens
  Heavy chain
QVQLVESGGGVVQPGRSLRLSCAASGFTFRSYGMHWVRQAPGKGLEWVAVTWYDGSNKNYADSVKGRFTISRDNSKNTLYLQMNSLRAEDTAVYYCARGGLTGDFDYWGQGTLVTVSSA

SEQ ID NO: 8779 - protein, 119 aa, Homo sapiens
  Heavy chain
QVQLVESGGGVVQPGRSLRLSCAASGFTFSSYGMHWVRQAPGKGLEWVAVTWYDGRNKYYADSLKGRFTISRDISKNTLYLQMNSLRDEDTAVYYCARGGSYGAFDIWGQGTMVTVSSA

SEQ ID NO: 8780 - protein, 119 aa, Homo sapiens
  Heavy chain
QVQLVESGGGVVQPGRSLRLSCAASGFTFSSYGIHWVRQAPGKGLEWVAVIWYDGSNKHYADSVKGRFTISRDNSKNTLYLQMNSLRAEDTAVYYCARGELLGYFDNWGQGTLVTVSSA

SEQ ID NO: 8781 - protein, 119 aa, Homo sapiens
  Heavy chain
QVQLVESGGGVVQPGRSLRLSCAASGFAFSSYGIHWVRQAPGKGLEWVAVIWYDGSNKHYADSVKGRSTISRDNSKNTLYLQMNSLRAEDTAVYYCARGELLGYFDSWGQGTLVTVSSA

SEQ ID NO: 8782 - protein, 119 aa, Homo sapiens
  Heavy chain
QVQLVESGGGVVQPGRSLRLSCAASGFTFSSYGIHWVRQAPGKGLEWVAVTWYDGSNKYYADSVKGRFTISRDNSKNTLFLQMNSLRAEDTAVYYCARGGLLGHFDYWGQGTLVTVSSA

SEQ ID NO: 8783 - protein, 119 aa, Homo sapiens; identical to SEQ ID NO: 8772
  Heavy chain

SEQ ID NO: 8784 - protein, 119 aa, Homo sapiens; identical to SEQ ID NO: 8782
  Heavy chain

SEQ ID NO: 8785 - protein, 119 aa, Homo sapiens
  Heavy chain
QVQLVESGGGVVQPERSLRLSCAASGFTFSSYGMHWVRQAPGKGLEWVAVIWYDGSNKHYADSVKGRFTISRDNSKNTLYLQMNSLRAEDTAVYYCARGGRLGAFDYWGQGTLVTVSSA

SEQ ID NO: 8786 - protein, 119 aa, Homo sapiens
  Heavy chain
QVQLVESGGGVVQPGRSLRLSCAASGFTFSSYGMHWVRQAPGKGLEWVAVIWYDGNNKHYADSVKGRSTISRDNSKNTLYLQMNSLRAEDTAVYYCARGGLLGYFDYWGQGTLVTVSSA

SEQ ID NO: 8787 - protein, 119 aa, Homo sapiens
  Heavy chain
QVQLVESGGGVVQPGRSLRLSCAASGFTFSSYGMHWVRQAPGKGLEWVAVVWYDGNNKHYADSVKGRFTISRDNSKNTLYLQMNSLRAEDTAVYYCARGDLLGSFDYWGQGTLVTVSSA

SEQ ID NO: 8788 - protein, 119 aa, Homo sapiens; identical to SEQ ID NO: 8772
  Heavy chain

SEQ ID NO: 8789 - protein, 119 aa, Homo sapiens
  Heavy chain
QVQLVESGGGVVQPGRSLRLSCAASGFTFSSYGIHWVRQAPGKGLEWVAVTWYDGSNKNYADSVKGRFTISRDNSKNKLYLQMNSLRAEDTAVYYCVRGELLGYFDYWGQGTLVTVSSA

SEQ ID NO: 8790 - protein, 121 aa, Homo sapiens
  Heavy chain
QVQLVESGGGVVQPGRSLRLSCAASGFTFSSYGMHWVRQAPGKGLEWVAVIWYDGSNKYYADSVKGRFTISRDDSRYTLYLQMNSLRAEDTAVYYCARGSILAAGIFDYWGQGTLVTVSSA

SEQ ID NO: 8791 - protein, 119 aa, Homo sapiens
  Heavy chain
QVQLVESGGGVVQPGRSLRLSCAASGFTFSSYGMHWVRQAPGKGLEWVAVIWYEGSNKYYADSVKGRFTISRDNSKNTLYLQMNSLRAEDTAVYYCARGGDWGAFDIWGQGTMVTVSSA

SEQ ID NO: 8792 - protein, 118 aa, Homo sapiens
  Heavy chain
QVQLVESGGGVVQPGRSLRLSCAASGFTFSSYGMHWVRQAPGKGLEWVAVKWYDGSNKHYVDSVKGRFTISRDNSKNTLYLQMNSLRAEDTAVYYCARSIVGAFDFWGQGTLVTVSSA

SEQ ID NO: 8793 - protein, 119 aa, Homo sapiens
  Heavy chain
QVQLVESGGGVVQPGRSLRLSCAASGFTFSSYGMHWVRQAPGKGLEWVAVIWYDGSNKNYADSVKGRFTISRDKSKNTLYLQMNSLRAEDTAVYYCARGGLTGGFDYWGQGTLVTVSSA

SEQ ID NO: 8794 - protein, 119 aa, Homo sapiens
  Heavy chain
QVQLVESGGGVVQPGRSLRLSCAASGFTFSSYGMNWVRQAPGKGLEWVAVTWYDGNNKHYADSVKGRFTISRDNSKNTLYLQMNSLKAEDTAVYYCARGGFFGCFDYWGQGALVTVSSA

SEQ ID NO: 8795 - protein, 119 aa, Homo sapiens; identical to SEQ ID NO: 8747
  Heavy chain

SEQ ID NO: 8796 - protein, 119 aa, Homo sapiens
  Heavy chain
QVQLVESGGGVVQPGRSLRLSCAASGFTFSSYGMHWVRQAPGKGLEWVAVIWYDGSNKHYADSLKGRFTISRDNSKNTLYLQMNSLRAEDTAVYYCARGSKLGPFDYWGQGTLVTVSSA

SEQ ID NO: 8797 - protein, 119 aa, Homo sapiens
  Heavy chain
QVQLVESGGGVVQPGRSLRLSCAASGFTFSSFGMHWVRQAPGKGLEWVAVTWYNGRNKYYADSVKGRFTISRDISKSTLYLQMNSLRVEDTAIYYCARGGYYGAFDIWGQGTMVTVSSA

SEQ ID NO: 8798 - protein, 119 aa, Homo sapiens; identical to SEQ ID NO: 8787
  Heavy chain

SEQ ID NO: 8799 - protein, 119 aa, Homo sapiens
  Heavy chain
QVQLVESGGGVVQPGRSLRLSCAASGFTFSSYGMHWVRQAPGKGLEWVAVVWYDGNNKHYADSVKGRFTISRDNSKNTLYLQMNSLRAEDTAVFYCARGHLLGSFDYWGQGTLVTVSSA

SEQ ID NO: 8800 - protein, 120 aa, Homo sapiens
  Heavy chain
QVQLQESGPGLVKPSETLSLTCTVSGGSISSYYWSWIRQPPGKGLEWIGYIHYSGRTNYNPSLKSRVTISVDTSKNQFSLKLSSVTAADTAVYYCARGYRGSYGLFDYWGQGTLVPVSSA

SEQ ID NO: 8801 - protein, 119 aa, Homo sapiens; identical to SEQ ID NO: 8737
  Heavy chain

SEQ ID NO: 8802 - protein, 125 aa, Homo sapiens
  Heavy chain
EVQLVESGGGLVQPGGSLRLSCAASGFTFSIYTMSWVRQAPGKGLEWVSTISGSGGGTYYADSVKGRFTISRDNSKNTLYLQMNSLRAEDTAVYYCAKDLLRYFDWLLSPFDYWGQGTLVTVSSA

SEQ ID NO: 8803 - protein, 119 aa, Homo sapiens; identical to SEQ ID NO: 8797
  Heavy chain

SEQ ID NO: 8804 - protein, 125 aa, Homo sapiens
  Heavy chain
QVQLVESGGGVVQPGRSLRLSCAASGFTFSSYGMHWVRQAPGKGLEWVAVISYDGSKKYYADSVKGRFTISRDNSKNTLYLQMNSLRAEDTAVYYCAREDDILTAYYYYGMDVWGQGTTVTVSSA

SEQ ID NO: 8805 - protein, 119 aa, Homo sapiens
  Heavy chain
QVQLVESGGGVVQPGRSLRLSCAASGFTFSSHGMHWVRQAPGKGLEWVAVTWYDGRNKYYADSVKGRLTISRDNSKNTLYLEMNSLRAEDTAVYYCARGGYYGPFDIWGQGTMVTVSSA

SEQ ID NO: 8806 - protein, 119 aa, Homo sapiens; identical to SEQ ID NO: 8739
  Heavy chain

SEQ ID NO: 8807 - protein, 118 aa, Homo sapiens
  Heavy chain
QVQLVESGGGVVQPGRSLRLSCAASGFTFSSYGMHWVRQAPGKGLEWVAVTWYDGSNKYYADSVKGRFTSSRDNSKNTLYLQMNSLRAEDTAVYYCARSIVGAFDYWGQGTLVTVSSA

SEQ ID NO: 8808 - protein, 120 aa, Homo sapiens
  Heavy chain
QVQLQESGPGLVKPSETLSLTCTVSGGSISSYYWSWIRQPPGKGLEWIGYIYYSGRTNYNPSLKSRVTISVDTSKNQLSLKLSSVTAADTAVYYCARGYSGSYGLFDYWGQGTLVTVSSA

SEQ ID NO: 8809 - protein, 119 aa, Homo sapiens; identical to SEQ ID NO: 8740
  Heavy chain

SEQ ID NO: 8810 - protein, 119 aa, Homo sapiens; identical to SEQ ID NO: 8757
  Heavy chain

SEQ ID NO: 8811 - protein, 125 aa, Homo sapiens
  Heavy chain
QVQLVESGGGVVQPGRSLRLSCAASGFTFSSYGMHWVRQAPGKGLEWVAVISYDGSNKYYADSVKGRFTISRDNSKNTLYLQMNSLRAEDTAVYYCARDRGTYYDYYYYGMDVWGQGTTVTVSSA

SEQ ID NO: 8812 - protein, 123 aa, Homo sapiens
  Heavy chain
QVQLVESGGGVVQPGRSLRLSCAASGFTFSNYGMHWVRQAPGKGLEWVSVISYDGSHKYYADSVKGRFTISRDSSKNTLYLQMNSLRAEDTAVYYCARDDDILTGLYGMDVWGQGTTVTVSSA

SEQ ID NO: 8813 - protein, 125 aa, Homo sapiens; identical to SEQ ID NO: 8811
  Heavy chain

SEQ ID NO: 8814 - protein, 126 aa, Homo sapiens
  Heavy chain
EVQLVESGGGLVQPGGSLRLSCAASGFTFSSYWMSWVRQAPGKGLEWVANIKQDGSEKYYVDSVKGRFTISRDNAKNSLYLQMNSLRAEDTAVYYCARDRYYYGSGRYYRYLDLWGRGTLVTVSSA

SEQ ID NO: 8815 - protein, 122 aa, Homo sapiens
  Heavy chain
QVQLVESGGGVVQPGRSLRLSCAASGFTFSSYAMHWVRQAPGKGLEWVAVIWYDGNNKYYADSVKGRFTISRDNSKNTLYLQMNSLRAEDTAVYYCARDRGSGNYEYFDLWGRGTLVTVSSA

SEQ ID NO: 8816 - protein, 123 aa, Homo sapiens
  Heavy chain
QLQLQESGPGLVKPSETLSLTCTVSGGSISSSSYYWGWIRQPPGKGLEWIGSIYYSGSTYYNPSLKSRVTIPVDTSKTQFSLKLSSVTAADTAVYYCARIGRIAAAGSIDYWGQGTLVTVSSA

SEQ ID NO: 8817 - protein, 119 aa, Homo sapiens; identical to SEQ ID NO: 8777
  Heavy chain

SEQ ID NO: 8818 - protein, 119 aa, Homo sapiens
  Heavy chain
QVQLVESGGGVVQPGRSLRLSCAASGFTLSSYGMHWVRQAPGKGLEWVAVIWYDGSNKYYADSVKGRFTFSRDNSKNTLYLQMNSLRAEDTAVYYCARGGLTGAFDIWGQGTTVTVSSA

SEQ ID NO: 8819 - protein, 119 aa, Homo sapiens; identical to SEQ ID NO: 8775
  Heavy chain

SEQ ID NO: 8820 - protein, 117 aa, Homo sapiens
  Heavy chain
QVQLVQSGAEVKKPGASVKVSCKASGYTFTSYGISWVRQAPGQGLEWMGWISAYNGNTNYAQKLQGRVTMTTDTSTSTAYMELRSLRSDDTAVYYCARVGPHFDYWGQGTLVTVSSA

SEQ ID NO: 8821 - protein, 119 aa, Homo sapiens
  Heavy chain
QVQLVESGGGVVQPGRSLRLSCAASGFTFSSYGMHWVRQGPGKGLDWVAVVWYDGNNKHYADSVKGRFTISRDNSKNTLFLQMNSLRVEDTAVYYCARGGLLGSFDYWGQGTLVTVSSA

SEQ ID NO: 8822 - protein, 120 aa, Homo sapiens
  Heavy chain
QVQLVESGGGVVQPGRSLRLSCAASGFTFSSYGMHWVRQAPGKGLEWVAVIWYDGSNKHYADSVKGRLTISRDNSKNTLYLQMNSLRAEDTAVYYCARGANWGPHFDYWGRGTLVTVSSA

SEQ ID NO: 8823 - protein, 119 aa, Homo sapiens
  Heavy chain
QVQLVESGGGVVQPGRSLRLSCAASGFTFSSFGMHWVRQAPGKGLEWVAVIWYDGNNKYYADSVKGRFTISRDNSKNTLSLQMNSLRAEDTALYYCARGALLGAFDIWGQGTMVTVSSA

SEQ ID NO: 8824 - protein, 117 aa, Homo sapiens
  Heavy chain
QVQLVQSGAEVKKPGASVKVSCKASGYTFTNYGISWVRQAPGQGLEWMGWISVYNGNTNYAQKLQGRVTMTTDTSTSTAYMELRSLRSDDTAVYYCARGPPTLHYWGQGTLVTVSSA

SEQ ID NO: 8825 - protein, 121 aa, Homo sapiens
  Heavy chain
QVQLVESGGGVVQPGRSLRLSCAASGFTFSSYGMHWVRQAPGKGLEWVAVLWYDGSNNYFADSVKGRFTISRDNSKNTLYLHMNSLRAEDTAVYYCARGGLWFGEFLDYWGQGTLVTVSSA

SEQ ID NO: 8826 - protein, 119 aa, Homo sapiens
  Heavy chain
QVQLVESGGGVVQPGRSLRLSCAASGFTFSSYGMHWVRQAPGKGLEWVAVVWYDGNNKHYADSVKGRFTISRDNSKNTLYLQMNSLRAEDTAVYYCVRGDLLGSFDYWGQGTLVTVSSA

SEQ ID NO: 8827 - protein, 125 aa, Homo sapiens
  Heavy chain
QVQLQQSGPGLVKPSQTLSLTCAISGDSVSSNRAAWNWIRQSPSRGLEWLGRTYYRSKWYNDYAVSVKSRITINPDTSKNQFSLQLNSVTPEDTAVYYCARDKVLLWFGEFDYWGQGTLVTVSSA

SEQ ID NO: 8828 - protein, 121 aa, Homo sapiens
  Heavy chain
EVQLVESGGGLVQPGRSQRLSCTASGFTFGDYAMTWIRQAPGKGLEWVGFIRSKTYGGTTEYAASVRDRFTISRDDSKSIAYLQMKSLKTEDTAVYYCSFRYTYGPFDYWGQGTLVTVSSA

SEQ ID NO: 8829 - protein, 119 aa, Homo sapiens
  Heavy chain
QVQLVESGGGVVQPGRSLRLSCAASGFTFSSYGMHWVRQAPGKGLEWVAVIWYDGSNKHYADSVKGRFIISRDNSKNTLYLQMNSLRAEDTAVYYCVRSGLVTPFDYWGQGTLVTVSSA

SEQ ID NO: 8830 - protein, 118 aa, Homo sapiens
  Heavy chain
QVQLVQSGAEVKKPGASVKVSCKASGYTFTSYGIGWVRQAPGQGLEWMGWISAYNGNTNYAQKLQGRVTMTTDTSTSTAYMELRSLRSDDTAVYYCARVGGATIDYWGQGTLVTVSSA

SEQ ID NO: 8831 - protein, 119 aa, Homo sapiens
  Heavy chain
QVQLVESGGGVVQPGRSLRLSCAASGFTFRSYGMHWVRQAPGKGLEWVAVTWYDGSNKNYADSVKGRFTISRDNSKNTLYLQMNSLRAEDTAVYYCARGGLTGDFNYWGQGTLVTVSLA

SEQ ID NO: 8832 - protein, 119 aa, Homo sapiens
  Heavy chain
QVQLVESGGGVVQPGRSLRLSCAASGFTFSSYGMHWVRQAPGKGLEWVAVIWYDGNNKHYADSVKGRSTISRDNSKNTLYLQMNSLRAEDTAVYYCARGGLLGCFDYWGQGTLVTVSSA

SEQ ID NO: 8833 - protein, 123 aa, Homo sapiens
  Heavy chain
QVQLQESGPGLVKPSETLSLTCTVSGVSISSYYWNWIRQPPGKGLEWLGYIYHSGSTNYNPSLKSRVTISVDTSKNQFSLKLSSVTAADTAVYYCARGGGLLWFGGIGMDVWGQGTEVTVSSA

SEQ ID NO: 8834 - protein, 119 aa, Homo sapiens
  Heavy chain
QVQLVESGGGVVQPGRSLRLSCAASGFTFSSYGMHWVRQAPGKGLEWVAVIWYDGSNKHYADSVEGRSTISRDNSKNTLYLQMNSLRAEDTAVYYCSRGELLGYFDYWGQGTLVTVSSA

SEQ ID NO: 8835 - protein, 119 aa, Homo sapiens; identical to SEQ ID NO: 8735
  Heavy chain

SEQ ID NO: 8836 - protein, 119 aa, Homo sapiens; identical to SEQ ID NO: 8779
  Heavy chain

SEQ ID NO: 8837 - protein, 119 aa, Homo sapiens
  Heavy chain
QVQLVESGGGVVQPGRSLRLSCAASGFTFSSYGMHWVRQAPGKGLEWVAVTWYDGSNKHCADSVKGRFTISRDNSKNTLYLQMNSLRAEDSAVYYCARGELLGYLDYWGQGTLVTVSSA

SEQ ID NO: 8838 - protein, 119 aa, Homo sapiens
  Heavy chain
QVQLVESGGGVVQPGRSLRLSCAASGFTFSSYGIHWVRQAPGKGLEWVAVIWYDGSNKHYADSVKGRFTISRDNSKNTLDLQMNSLRAEDTAVYYCARGGYFGCFDFWGQGTLVTVSSA

SEQ ID NO: 8839 - protein, 123 aa, Homo sapiens; identical to SEQ ID NO: 8812
  Heavy chain

SEQ ID NO: 8840 - protein, 119 aa, Homo sapiens; identical to SEQ ID NO: 8797
  Heavy chain

SEQ ID NO: 8841 - protein, 119 aa, Homo sapiens
  Heavy chain
QVQLVESGGGVVQPGGSLRLSCAASGFTFSSYGMHWVRQAPGKGLEWVTVMWYDGSNKHYADSVKGRFTISRDNSKNTLYLQMNSLRAEDTAVYYCVRGELLGYFDNWGQGTLVTVSSA

SEQ ID NO: 8842 - protein, 119 aa, Homo sapiens; identical to SEQ ID NO: 8773
  Heavy chain

SEQ ID NO: 8843 - protein, 119 aa, Homo sapiens; identical to SEQ ID NO: 8772
  Heavy chain

SEQ ID NO: 8844 - protein, 119 aa, Homo sapiens
  Heavy chain
QVQLVQSGAEVKKPGASVKVSCKASGYTFTSYGISWVRQAPGQGLEWMGWISAYNGNTNYAQKLQGRVTMTTDTSTSTAYMELRSLRSDDTAVYYCLTVAGPHVFDYWGQGTLVTVSSA

SEQ ID NO: 8845 - protein, 119 aa, Homo sapiens; identical to SEQ ID NO: 8773
  Heavy chain

SEQ ID NO: 8846 - protein, 119 aa, Homo sapiens; identical to SEQ ID NO: 8735
  Heavy chain

SEQ ID NO: 8847 - protein, 119 aa, Homo sapiens
  Heavy chain
QVQLVESGGGVVQPGSSLRLSCAASGFTFSSHGMHWVRQAPGKGLEWVAVIWYDGSNKHYADSVKGRFTTSRDNSKNTLHLQMNSLRAEDTAVYFCARGGYFGCFDYWGQGTLVTVSSA

SEQ ID NO: 8848 - protein, 119 aa, Homo sapiens
  Heavy chain
QVQLVESGGGVVQPGRSLRLSCAASGFTFSSYGMHWVRQAPGKGLEWVAVIWYDGSNKHYADSVKGRFTISRDNSKNTLYLQMNSLRAEDTAVYYCARGSKLGPFDYWGQGTLVTVSSA

SEQ ID NO: 8849 - protein, 119 aa, Homo sapiens
  Heavy chain
QVQLVESGGGVVQPGRSLRLSCAASGFTFSSYGIHWVRQAPGKGLEWVAVIWYDGSNKHYADSVKGRFTISRDNSKNTLYLEMNSLRAEDTAVYYCARGGYFGCFDQWGQGTLVTVSSA

SEQ ID NO: 8850 - protein, 119 aa, Homo sapiens; identical to SEQ ID NO: 8847
  Heavy chain

SEQ ID NO: 8851 - protein, 119 aa, Homo sapiens
  Heavy chain
QVQLVESGGGVVQPGRSLRLSCAASGFTFSSYGIHWVRQAPGKGLEWVAVIWYDGSNKHYADSVRGRSTISRDNSKNTLYLQMNSLRAEDTAVYFCARGDLLGYFDYWGQGTLVTVSSA

SEQ ID NO: 8852 - protein, 119 aa, Homo sapiens
  Heavy chain
QVQLVESGGGVVQPGRSLRLSCAASGFTFSSYGIHWVRQAPGKGLEWVAVIWYDGSNKNYADSVKGRFTISRDNSKNTLYLQMNSLRAEDTAVYYCARGELLGYFDYWGQGTLVTVSSA

SEQ ID NO: 8853 - protein, 119 aa, Homo sapiens
  Heavy chain
QVQLVESGGGVVQPGRSLRLSCAASGFTFSSYGTHWVRQAPGKGLEWVAVIWYDGSNKYYADSVKGRFTISRDNSKNTLYLQMNSLRAEDTAIYYCARAGNWGAFDIWGQGTMVTVSSA

SEQ ID NO: 8854 - protein, 119 aa, Homo sapiens
  Heavy chain
QVQLVESGGGVVQPGRSLRLSCAASGFTFSSYGMHWVRQAPGKGLEWVAVMWYDGSNKHCADSVKGRFTISRDNSKNTLYLQMNSLRAEDTAVYYCVRGELLGYFDNWGQGTLVTVSSA

SEQ ID NO: 8855 - protein, 119 aa, Homo sapiens; identical to SEQ ID NO: 8740
  Heavy chain

SEQ ID NO: 8856 - protein, 119 aa, Homo sapiens
  Heavy chain
QVQLVESGGGVVQPGKSLRLSCAASGFTFSSYGIHWVRQAPGKGLEWVAVIWYDGSNKHYADSVKGRFTISRDNSKNTLYLQMNSLRAEDTAVYYCARGELLGYFDNWGQGTLVTVSSA

SEQ ID NO: 8857 - protein, 122 aa, Homo sapiens
  Heavy chain
QVQLVESGGGVVQPGRSLRLSCAASGFTFSNYAMHWVRQAPGKGLEWVAVVWYDGNHKYYADSVRGRFTISRDNSNNTLYLQMNSLRAEDTAVYYCAREKGSGWYEGMDVWGQGTTVTVSSA

SEQ ID NO: 8858 - protein, 119 aa, Homo sapiens
  Heavy chain
QVQLVESGGGVVQPGRSLRLSCAASGFTFSSYGMHWVRQAPGKGLEWVAVIWYDGSNKHYADSVKGRFTISRDNSKNTLYLQMNSLRAEDTAVYYCARGAKLGPFDYWGQGTLVTVSSA

SEQ ID NO: 8859 - protein, 119 aa, Homo sapiens
  Heavy chain
QVQLVESGGGVVQPGMSLRLSCAASGFTFSSYGMHWVRQAPGKGLEWVAVIWYDGNNRHYADSVKGRFTISRDSSKNTLYLQMNSLRAEDTAVYYCARGGRLGAFDYWGQGTLVTVSSA

SEQ ID NO: 8860 - protein, 119 aa, Homo sapiens
  Heavy chain
QVQLVESGGGVVQPGRSLRLSCAASGFTFSSYGMHWVRQAPGKGLEWVAVIWYDGSNKYYADSVKGRFTISRDKSKNTLYLQMNSLRAEDTAVHYCARGGYLGAFDIWGQGTMVTVSSA

SEQ ID NO: 8861 - protein, 119 aa, Homo sapiens
  Heavy chain
QVQLVESGGGVVQPGRSLRLSCAASGFTFSSHGMHWVRQAPGKGLEWVAVTWYDGSNKHYADSVKGRATISRDNSKNTLYLQMNSLRAEDTAVYYCTRGELLGHFDYWGQGTLVTVSSA

SEQ ID NO: 8862 - protein, 119 aa, Homo sapiens
  Heavy chain
QVQLVESGGGVVQPGRSLRLSCAASGFTFSSYGIHWVRQAPGKGLEWVAVIWYDGSNKHYADSVKGRFTISRDNSKNTLYLEMNSLRAEDTAVYYCARGGYFGCFDPWGQGTLVTVSSA

SEQ ID NO: 8863 - protein, 119 aa, Homo sapiens
  Heavy chain
QVQLVESGGGVVQPGSSLRLSCAASGFTFSSHGMHWVRQAPGKGLEWVAVIWYDGSNKHYADSVKGRFTTSRDNSKNTLHLQMNSLRAEDTAVYFCARGGYFGCFDSWGQGTLVTVSSA

SEQ ID NO: 8864 - protein, 119 aa, Homo sapiens; identical to SEQ ID NO: 8852
  Heavy chain

SEQ ID NO: 8865 - protein, 119 aa, Homo sapiens; identical to SEQ ID NO: 8847
  Heavy chain

SEQ ID NO: 8866 - protein, 119 aa, Homo sapiens
  Heavy chain
QVQLVESGGGVVQPGRSLRLSCAASGFTFSSHGMHWVRQAPGKGLEWVAVTWYDGSNKHYADSVKGRATISRDNSKNTLYLQMNSLRAEDTAVYYCTRGELLGYVDYWGQGTLVTVSSA

SEQ ID NO: 8867 - protein, 119 aa, Homo sapiens; identical to SEQ ID NO: 8735
  Heavy chain

SEQ ID NO: 8868 - protein, 119 aa, Homo sapiens
  Heavy chain
QVQLVESGGGVVQPGSSLRLSCAASGFTFSSHGMHWVRQAPGKGLEWVAVIWYDGSNKHYADSVKGRFTTSRDNSKNTLHLQMNSLRAEDTAVYFCARGGYFGCVDYWGQGTLVTVSSA

SEQ ID NO: 8869 - protein, 119 aa, Homo sapiens
  Heavy chain
QVQLVESGGGVVQPGRSLRLSCAASGFTFSSHGMHWVRQAPGKGLEWVAVTWYDGSNKHYADSVKGRATISRDNSKNTLYLQMNSLRAEDTAVYYCTRGDLLGYFDYWGRGTLVTVSSA

SEQ ID NO: 8870 - protein, 123 aa, Homo sapiens
  Heavy chain
QVQLVESGGGVVQPGRSLRLSCAASGFTFSSYGMHWVRQAPGKGLEWVAVIWYDGRNKDYADSVKGRITISRDNSKNTLYLQMNSLRAEDTAVYYCARGGLLGPYFDYWGQGTLVTVSSAKTT

SEQ ID NO: 8871 - protein, 123 aa, Homo sapiens
  Heavy chain
QVQLVESGGGVVQPGRSLRLSCAASGFTFSSYGMNWVRQAPGKGLEWVAVIWYDGRNKHYADSVKGRFTISRDNSKNTLYLQMNSLRAEDTAVYYCARGGDWGPYFDYWGQGTLVTVSSAKTT

SEQ ID NO: 8872 - protein, 123 aa, Homo sapiens
  Heavy chain
QVQLVESGGGVVQPGRSLRLSCIASGFTFSSYGMHWVRQAPGKGLEWVAVNWYDGSNKHYADSVKGRFTISRDNSKNTLYLQMNSLRAEDTAVYYCARGGVWGPYFDYWGQGTLVTVSSAKTT

SEQ ID NO: 8873 - protein, 122 aa, Homo sapiens
  Heavy chain
QVQLVESGGGVVQPGRSLRLSCAASGFTFSSYGMHWVRQAPGTGLEWVAVIWYEGRNKYYADPVKGRFTISRDNSKNTLYLQMNSLRDDDTAVYYCARAGDLGAFDIWGQGTMVTVSSAKTT

SEQ ID NO: 8874 - protein, 121 aa, Homo sapiens
  Heavy chain
QVQLVQSGAEVKKPGASVKVSCKASGYTFTDYGISWVRQAPGQGLECMGWISAYNGNTNYAQNLQGRVTMTTDTSTNTAYMELRSLRSDDTAVYYCARVGAGDWDYWGQGTLVTVSSAKTT

SEQ ID NO: 8875 - protein, 122 aa, Homo sapiens
  Heavy chain
QVQLVESGGGVVQPGRSLRLSCAASGFTLSSFGMHWVRQAPGKGLEWVAVIWYDGSNKYYADSVKGRFIISRDNSKTALYLQMNSLRAEDTAVYYCARAHYFGAFDIWGQGTMVTVSSAKTT

SEQ ID NO: 8876 - protein, 122 aa, Homo sapiens
  Heavy chain
EVQLVESGGGLVQPGGSLRLSCAASGFTFSNYAMSWVRQAPGKGLEWVSAISGGGLSTYYADSVKGRFTISRDNSKNTLYLQMNSLRAEDTAVYYCAKDLLWLGFDYWGQGTLVTVSSAKTT

SEQ ID NO: 8877 - protein, 123 aa, Homo sapiens; identical to SEQ ID NO: 8871
  Heavy chain

SEQ ID NO: 8878 - protein, 122 aa, Homo sapiens
  Heavy chain
QVQLVESGGGVVQPGRSLRLSCAASGFTFRSYGMHWVRQAPGKGLEWVAVIWYDGSNKHYADSVKGRFTISRDNSKNTLYLQMNSLRAEDTAVYYCARNGLIGAFDIWGQGTMVTVSSAKTT

SEQ ID NO: 8879 - protein, 122 aa, Homo sapiens
  Heavy chain
QVQLVESGGGVVQPGRSLRLSCAASGFTFSSYGIHWVRQAPGKGLEWVAVIWYEGSNKFYADSVKGRFTISRDNSKNTLSLQMNSLRAEDTAVYYCARAGHLGAFDIWGQGTMVTVSSAKTT

SEQ ID NO: 8880 - protein, 122 aa, Homo sapiens; identical to SEQ ID NO: 8873
  Heavy chain

SEQ ID NO: 8881 - protein, 122 aa, Homo sapiens
  Heavy chain
EVQLVESGGGLVQPGGSLRLSCAASGFTFSSYAMSWVRQAPGKGLEWVSGISGSGGSTYYADSVKGRFTISRDNSKNTLYLQMNSLRAEDTAVYYCAKLGIAWYFDVWGRGTLVTVSSAKTT

SEQ ID NO: 8882 - protein, 122 aa, Homo sapiens
  Heavy chain
QVQLVESGGGVVQPGRSLRLSCAASGFTFSSYGIHWVRQAPGKGLEWVAVIWYDGSNKYYADSVKGRFTISRDNSKNTLYLQMNSLRAEDTAVYYCARAGDLAAFDIWGQGTMVTVSSAKTT

SEQ ID NO: 8883 - protein, 122 aa, Homo sapiens
  Heavy chain
QVQLVESGGGVVQPGRSLRLSCAASGFTFSRFGMHWVRQAPGKGLEWVAVIWYDGSNKHYADSVKDRFTISRDNSKNTLSLQMNSLRAEDTAVYYCARGGQLGPFDYWGQGILVTVSSAKTT

SEQ ID NO: 8884 - protein, 120 aa, Homo sapiens
  Heavy chain
QVQLVQSGAEVKKPGASVKVSCKASGYTFNYYGISWVRQAPGQGLEWMGWISVYNGNTNYVKKFQGRVTMTTDTSTNTAYMELRSLRSDDTAVYYCARWVRGVDYWGQGTLVTVSSAKTT

SEQ ID NO: 8885 - protein, 123 aa, Homo sapiens
  Heavy chain
QVQLVESGGGVVQPGRSLRLSCAASGFTLSSFGMHWVRQAPGKGLEWVAVIWYDGRNKYYEDSVKGRFTISRDNSNNTLYLQMNSLRAEDTAVYYCARGEYFGEFFDYWGQGTLVTVSSAKTT

SEQ ID NO: 8886 - protein, 122 aa, Homo sapiens
  Heavy chain
QVQLVESGGGVVQPGRSLRLSCAASGFTFSNYGIHWVRQTPGKGLEWVAVIWYDGSNRYYADSVKGRFTVSGDNSKNTLYLQMNSLRAEDTAVYYCARASLTGSFDYWGQGTLVTVSSAKTT

SEQ ID NO: 8887 - protein, 122 aa, Homo sapiens
  Heavy chain
QVQLVESGGGVVQPGRSLRLSCAASGFTFNSYGVHWVRQAPGKGLEWVAVIWYEGSNKFYADSVKGRFTISRDNSKNTLFLQMNSLRAEDTAVYYCVRAGYLGAFDIWGQGTMVTVSSAKTT

SEQ ID NO: 8888 - protein, 127 aa, Homo sapiens
  Heavy chain
QVQLVESGGGVVQPGRSLRLSCAASGFTFSSYGMHWVRQAPGKGLEWVAVIWYDGSYKYYADSVKGRFTISRDDSKNTLYLQMSSLRAEDTAVYYCARAPHYAILTGYYEDYWGQGTLVTVSSAKTT

SEQ ID NO: 8889 - protein, 124 aa, Homo sapiens
  Heavy chain
QVQLVQSGAEVKKPGASVKVSCKASDYTFTYYGISWVRQAPGQGLEWMGWISAYNGNTNYAQKLQGRVTMTTDTSTNTAYLELRSLRSDDTAVYYCARDYYDSSGYFDYWGQGTLVTVSSAKTT

SEQ ID NO: 8890 - protein, 122 aa, Homo sapiens
  Heavy chain
QVQLVQSGAEVKKPGASVKVSCKASGYTFTSYGISWVRQAPGQGLEWMGWISAYNGNTYYAQKFQGRVTMTTDTSTSTAYVELRSLRSDDTAVYYCARVTGRDAFDIWGQGTMVTVSSAKTT

SEQ ID NO: 8891 - protein, 124 aa, Homo sapiens
  Heavy chain
QVQLVESGGGVVQPGRSLRLSCAASGFTFSSYGMHWVRQAPGKGLEWVAVIWYDGNNKYYADSVKGRFTISRDNSKNTLYLQMYSLRAEDTAVYYCARGGILAAGIFDYWGQGTLVTVSSAKTT

SEQ ID NO: 8892 - protein, 126 aa, Homo sapiens
  Heavy chain
QVQLVESGGGVVQPGRSLRLSCAASGFTFSSYGMHWVRQAPGKGLEWVAVIWYDGNNKYYADSVKGRFTISRDNSKNTLYLQMNSLRADDTAVYYCARMLRGAPYYYGMDVWGQGTTITVSSAKTT

SEQ ID NO: 8893 - protein, 122 aa, Homo sapiens; identical to SEQ ID NO: 8886
  Heavy chain

SEQ ID NO: 8894 - protein, 121 aa, Homo sapiens
  Heavy chain
QVQLVQSGAEVKKPGASVKVSCKASGYTFTSYGISWVRQAPGQGLECMGWISAYNGNTNYAQKFQGRVTMITDTSTSTAYMELRSLRSDDTAVYYCARVGPINLDYWGQGTLVTVSSAKTT

SEQ ID NO: 8895 - protein, 122 aa, Homo sapiens
  Heavy chain
QVQLVESGGGVVQPGRSLRLSCAASGFTFSSYGMHWVRQAPGKGLEWVAVIWYDGRNKHYADSVKGRFIISRDNSKNTLYLQMNSLRAEDTAVYYCARGSQLGPFDYWGQGTLVTVSSAKTT

SEQ ID NO: 8896 - protein, 123 aa, Homo sapiens; identical to SEQ ID NO: 8870
  Heavy chain

SEQ ID NO: 8897 - protein, 123 aa, Homo sapiens
  Heavy chain
QVQLVESGGGVVQPGRSLRLSCAASGFTFSSHGMHWVRQAPGKGLEWVAVIWYDGSNKHYADSVKGRFTISRDNSKNTLYLQMNSLRAEDTAVYYCARGDILTGYYGYWGQGTLVTVSSAKTT

SEQ ID NO: 8898 - protein, 123 aa, Homo sapiens
  Heavy chain
QVQLVESGGGVVQPGRSLRLSCTASGFTFSSYGMHWVRQAPGKGLEWVAVSWYDGSNKHYVDSVKGRFTISRDNSKNTLYLQMNSLRVEDTAVYYCARGGVWGSYFDYWGQGTLVTVSSAKTT

SEQ ID NO: 8899 - protein, 123 aa, Homo sapiens; identical to SEQ ID NO: 8870
  Heavy chain

SEQ ID NO: 8900 - protein, 121 aa, Homo sapiens
  Heavy chain
QVQLVQSGAEVKKPGASVKVSCKASGYTFTSYGISWVRQAPGQGLEWMGWISAYNGNTNYAQNLQGRVTMTTDTSTSTAYMELRSLRSDDTAVYYCARVGPTNLDYWGQGTLVTVSSAKTT

SEQ ID NO: 8901 - protein, 120 aa, Homo sapiens
  Heavy chain
QVQLVQSGDEVKKPGASVKVSCKASGYTFTSYGISWVRQAPGQGLEWMGWISAYNGNTNYAQKFQGRVTMTTDTSTSTAYMELRSLRSDDTAVYYCAKVSGYFDYWGQGTLVTVSSAKTT

SEQ ID NO: 8902 - protein, 127 aa, Homo sapiens
  Heavy chain
QVQLVESGGGVVQPGRSLRLSCAASGFTLSSYGMHWVRQAPGKGLEWVAVIWYDGSNKYYADSVKGRFTISRDNSKNTLYLQMNSLRAEDTAVYYCARAPHYGILTGYYEDYWGQGTLVTVSSAKTT

SEQ ID NO: 8903 - protein, 122 aa, Homo sapiens
  Heavy chain
QVQLVESGGGVVQPGRSLRLSCAASGFTFSSYGMHWVRQAPGKGLEWVAVIWYDGRNKYYADPVKGRFTISRDNSKNTLYLQMNSLRDEDTAVYYCARAGYLGAFDIWGQGTMVTVSSAKTT

SEQ ID NO: 8904 - protein, 122 aa, Homo sapiens
  Heavy chain
QVQLVESGGGVVQPGRSLRLSCAASGFTFSSYGMHWVRQAPGKGLEWVAVVLYDGNNKYYADSVKGRFTISRDNSKNTLYLQMNSLRAEDTAVYYCARGGLTGPFDYWGQGTLVTVSSAKTT

SEQ ID NO: 8905 - protein, 122 aa, Homo sapiens
  Heavy chain
QVQLVESGGGVVQPGRSLRLSCAASGFIFSSYGMHWVRQAPGKGLEWVAVIWYDGRNKNYVDSVKGRFTISRDNSKNTLYLEMNSLRAEDTAVYYCARGGYWGSFDYWGQGTLVTVSSAKTT

SEQ ID NO: 8906 - protein, 122 aa, Homo sapiens; identical to SEQ ID NO: 8875
  Heavy chain

SEQ ID NO: 8907 - protein, 121 aa, Homo sapiens
  Heavy chain
QVQLVQSGAEVKKPGASVKVSCKASGYTFTSYGIGWVRQAPGQGLEWMGWISAYNGNTNYAQKLQGRVTMTTDTSTSTAYMELRSLRSDDTAVYYCARVRGGGLDVWGQGTTVTVSSAKTT

SEQ ID NO: 8908 - protein, 122 aa, Homo sapiens
  Heavy chain
QVQLVESGGGVVQPGRSLRISCAASGFTFSSYGIHWVRQAPGKGLQWVAVIWYDGRNKYYADSVKGRFTISRDNSKNTLYLQMNSLRAEDTAVYYCSRSGSFGAFDIWGQGTMVTVSSAKTT

SEQ ID NO: 8909 - protein, 124 aa, Homo sapiens; identical to SEQ ID NO: 8891
  Heavy chain

SEQ ID NO: 8910 - protein, 122 aa, Homo sapiens
  Heavy chain
QVQLVESGGGVVQPGRSLRLSCAASGFTFSRYGMHWVRQAPGKGLEWVAVIWYDGRNKYYADSVKGRFTISRDNSKNTLYLQMNSLRAEDTALYSCARAGELGPFDYWGQGTLVTVSSAKTT

SEQ ID NO: 8911 - protein, 124 aa, Homo sapiens
  Heavy chain
QVQLVESGGGVVQPGRSLRLSCAASGFTFSSYGMHWVRQAPGKGLEWVAVIWYDGNNKYYADSVKGRFTISRDNSKNTLYLQMNGLRAEDTAMYYCVRGSIVAAGLFDYWGQGTLVTVSSAKTT

SEQ ID NO: 8912 - protein, 126 aa, Homo sapiens
  Heavy chain
QVQLVESGGGVVQPGRSLRLSCAASGFTFSSYGMHWVRQAPGKGLEWVAVIWYDVGNKYYIDSVKGRFTISRDNSKNTLYLQMNSLRAEDTAVYYCARDYYGSGSPRHFDYWGQGTLVTVSSAKTT

SEQ ID NO: 8913 - protein, 122 aa, Homo sapiens
  Heavy chain
QVQLVESGGGVVQPGRSLRLSCAASGFTFSSYGMNWVRQAPGKGLEWVAVIWYDGSNKHYADSVKGRFTISRDNSKNTLYLQMNSLRAEDTAVYYCARVHYFGAFDIWGQGTMVTVSSAKTT

SEQ ID NO: 8914 - protein, 121 aa, Homo sapiens
  Heavy chain
QVQLVQSGAEVKKPGASVKVSCKASGYTFTNYGISWVRQAPGQGLECMGWISAYNGNTNYAQKFQGRVTMTTDTSTSTAYMELRSLRSDDTAVYYCARVAAAGFDYWGQGTLVAVSSAKTT

SEQ ID NO: 8915 - protein, 122 aa, Homo sapiens
  Heavy chain
QVQLVESGGGVVQPGRSLRLSCAASGFTFSSHGMHWVRQAPGKGLEWVAVIWYDGINKYYADSVRGRFTISRDNSNNTLYLQLNSLRAEDTAVYYCARNSLLTGWDYWGQGTLVTVSSAKTT

SEQ ID NO: 8916 - protein, 123 aa, Homo sapiens; identical to SEQ ID NO: 8870
  Heavy chain

SEQ ID NO: 8917 - protein, 121 aa, Homo sapiens
  Heavy chain
QVQLVQSGAEVKKPGASVKVSCKASGYTFTNYGISWVRQAPGQGLEWMGWISVYNGNTNYAQKFQGRVTMTTDTSTSTAYMELRSLISDDTAVYYCARLGKGLFDYWGQGTLVTVSSAKTT

SEQ ID NO: 8918 - protein, 123 aa, Homo sapiens; identical to SEQ ID NO: 8898
  Heavy chain

SEQ ID NO: 8919 - protein, 128 aa, Homo sapiens
  Heavy chain
QVQLVESGGGVVQPGRSLRLSCAASGFTFSSYGMHWVRQAPGKGLEWVAVIWYDGSNKYYADSVRGRFTISRDNSKNTLYLQMNSLRAEDTAVYYCARDRYDILTGPYWYFDLWGRGTLVTVSSAKTT

SEQ ID NO: 8920 - protein, 122 aa, Homo sapiens
  Heavy chain
QVQLVQSGAEVKKPGASVKVSCKASGYTFTNYGISWVRQAPGQGLEWMGWISVYNGNTNYVQKFQGRVTMSTDTSTNTAHMELRSLRSDDTAVYYCARVGVRGIFDYWGQGTLVTVSSAKTT

SEQ ID NO: 8921 - protein, 121 aa, Homo sapiens
  Heavy chain
QVQLVQSGAEVKKPGASVKVSCKASGYTFTSYGIGWVRQAPGQGLELMGWISAYNGNTNYAQKLQGRVTMTTDTSTNTAYMELRSLRSDDTAVYYCARVRGGGMDVWGQGTTVTVSSAKTT

SEQ ID NO: 8922 - protein, 123 aa, Homo sapiens; identical to SEQ ID NO: 8870
  Heavy chain

SEQ ID NO: 8923 - protein, 123 aa, Homo sapiens; identical to SEQ ID NO: 8872
  Heavy chain

SEQ ID NO: 8924 - protein, 124 aa, Homo sapiens
  Heavy chain
QVQLVESGGGVVQPGRSLRLSCAASGFTFSSYGMHWVRQAPGKGLEWVAVIWYDGSNKYYADSVKGRFTISRDNSKNTLYLQMNSLRAEDTAVYYCARGGIVAAGILDYWGQGTLVTVSSAKTT

SEQ ID NO: 8925 - protein, 120 aa, Homo sapiens
  Heavy chain
QVQLVQSGAEVKKPGASVKVSCKASGYTFTNYGITWVRQAPGQGLEWMGWISAYNGNTNYAQKLQGRVTMTTDTSTSTAYMELRSLRSDDTAVYYCARVAPYFDYWGQGTLVTVSSAKTT

SEQ ID NO: 8926 - protein, 120 aa, Homo sapiens
  Heavy chain
QVQLVQSGAEVKKPGASVRVSCKASGYTFTSYGISWVRQAPGQGLEWMGWISAYNGNTNYAQKLQGRVTMTTDTSTSTAYMELRSLRSDDTAVYYCARFIYGMDVWGQGTTVTVSSAKTT

SEQ ID NO: 8927 - protein, 121 aa, Homo sapiens
  Heavy chain
QVQLVQSGAEVKKPGASVKVSCKASGYTFTSYGISWVRQAPGQGLECMGWISAYNGNTNYAQKLQGRVTMTTDTSTSTAYMELRSLRSDDTAVYYCARVGATNLDYWGQGTLVTVSSAKTT

SEQ ID NO: 8928 - protein, 122 aa, Homo sapiens
  Heavy chain
QVQLVESGGGVVQPGRSLRLSCAASGFTFSSNGMHWVRQAPGKGLEWVSVIWYDGNNKFYADSVKGRFTISRDNSKNTLYLQMNSLRAEDTAVYYCARAGHLGPFDYWGQGTLVTVSSAKTT

SEQ ID NO: 8929 - protein, 122 aa, Homo sapiens
  Heavy chain
QVQLVESGGGVVQPGRSLRLSCGASGFTFSSYGMHWVRQAPGKGLEWVAVIWYDGRNKYYEDSVKGRFTISRDNSKNTLYLQMNSLRAEDTAVYYCARAGLLGYFDYWGQGTLVTVSSAKTT

SEQ ID NO: 8930 - protein, 122 aa, Homo sapiens
  Heavy chain
QVQLVESGGGVVQPGRSLRLSCAASGFTFSSYGMHWVRQAPGKGLEWVAVIWYDGSNKFYADSVKGRFTISSDNSKNTRYLQMNSLRAEDTAVYYCARGGHLGSFDYWGQGTLVTVSSAKTT

SEQ ID NO: 8931 - protein, 121 aa, Homo sapiens
  Heavy chain
QVQLVQSGAEVKKPGASVKVSCKASGYTFTSYGIGWVRQAPGQGLEWMGWISAYNGNTNYAQKLQGRVTMTTDTSTSTAYMELRSLRSDDTAVYYCARVRGGGVDVWGQGTTVTVSSAKTT

SEQ ID NO: 8932 - protein, 122 aa, Homo sapiens
  Heavy chain
QVQLVESGGGVVQPGRSLRLSCAASGFTFSRYGMHWVRQAPGKGLEWVAVTWYDGSNKHYADSVRGRFTISRDNSKNTLYLQMNSLRAEDTAVYCCARSGSFGAFDIWGQGTMVTVSSAKTT

SEQ ID NO: 8933 - protein, 120 aa, Homo sapiens
  Heavy chain
QVQLVQSGAEVKKPGASVKVSCKASGYTFTNYGINWVRQAPGQGLEWMGWISAYNGNTNYAQKFQGRVTMTTDTSTSTAYMELRNLRSDDTAVYYCARLGHYIDYWGQGTLVTVSSAKTT

SEQ ID NO: 8934 - protein, 122 aa, Homo sapiens
  Heavy chain
QVQLVESGGGVVQPGRSLRLSCAATGFNFSSYGIHWVRLAPGKGLEWVAVIWYDGSNRYYADSVKGRFTISRDTSKNTLYLQMNSLRAEDTAVYYCARAGLWSAFDIWGRGTMVSVSSAKTT

SEQ ID NO: 8935 - protein, 122 aa, Homo sapiens
  Heavy chain
QVQLVESGGGVVQPGRSLRLSCAASGFTFSSYGIHWVRQAPGKGLEWVAVIWYDGRNKHYADSVKGRFTISRDNSKNTLYLQMNSLRAEDTAVYYCARQDYWGPFDYWGQGTLVTVSSAKTT

SEQ ID NO: 8936 - protein, 121 aa, Homo sapiens
  Heavy chain
QVQLVQSGAEVKKPGASVKVSCKASGYTFTSYGISWVRQAPGQGLECMGWISAYNGNTNYAQKLQGRVTMTTDTSTSTAYMELRSLRSDDTAVYYCARVGIGAFDIWGQGTMVTVSSAKTT

SEQ ID NO: 8937 - protein, 123 aa, Homo sapiens; identical to SEQ ID NO: 8871
  Heavy chain

SEQ ID NO: 8938 - protein, 127 aa, Homo sapiens
  Heavy chain
QVQLVESGGGVVQPGRSLRLSCAASGFTFSSYGMHWVRQAPGKGLEWVALIWYDGSYKYYADSVKGRFTISRDNSKNTLYLQMNSLRAEDTAVYYCASAYYDLLTGPYYFDYWGQGTLVTVSSAKTT

SEQ ID NO: 8939 - protein, 122 aa, Homo sapiens; identical to SEQ ID NO: 8873
  Heavy chain

SEQ ID NO: 8940 - protein, 123 aa, Homo sapiens
  Heavy chain
QVQLVESGGGVVQPGRSLRLSCAASGFTFSSYGMHWVRQAPGKGLEWVAVIWYDGRNKHYADSVKGRFTISRDNSKNTLYLQMNSLRAEDTAVYYCARGEWFGEFFDYWGQGTLVTVSSAKTT

SEQ ID NO: 8941 - protein, 121 aa, Homo sapiens
  Heavy chain
QVQLVESGGGVVQPGRSLRLSCAASGFTFRSYGMHWVRQAPGKGLEWVAVIWYDGRNKHYADSVKGRFTISRDNSKNTLYLQMNSLRAEDTAVYYCARSIVGAFDYWGQGTLVTVSSAKTT

SEQ ID NO: 8942 - protein, 122 aa, Homo sapiens
  Heavy chain
QVQLVESGGGVVQPGRSLRLSCEASGFTFSSHGMHWVRQAPGKGLEWVAVIWYDGSNKHYADFVKGRFTISRDNSKNTLYLQVNSLRAEDTAVYYCARGHYFGAFDIWGQGTMVTVSSAKTT

SEQ ID NO: 8943 - protein, 123 aa, Homo sapiens; identical to SEQ ID NO: 8870
  Heavy chain

SEQ ID NO: 8944 - protein, 125 aa, Homo sapiens
  Heavy chain
QVQLVESGGGVVQPGRSLRLSCAASGFTFSSYGMHWVRQAPGKGLEWVAVISYDGSNKYYADSVKGRFTISRDNSKNTLYLQMNSLRAEDTAVYYCAREDYYGSGRNYYGMDVWGQGTTVTVSSA

SEQ ID NO: 8945 - protein, 122 aa, Homo sapiens; identical to SEQ ID NO: 8910
  Heavy chain

SEQ ID NO: 8946 - protein, 122 aa, Homo sapiens
  Heavy chain
QVQLVESGGGVVQPGRSLRLSCEASGFTFSSYGMNWVRQAPGKGLEWVAVIWYDGRNKHYTDSVKGRFTISRDNSKNTLYLQMNSLRAEDTAVYYCARAHYFGAFDIWGQGTMVTVSSAKTT

SEQ ID NO: 8947 - protein, 123 aa, Homo sapiens
  Heavy chain
QVQLVESGGGVVQPGRSLRLSCAASGFTFSNYGMNWVRQAPGKGLEWVAVIWYDGRNKHYADSVKGRFTISRDNSKNTLYLQMNSLRAEDTAVYYCARGGDWGPYFDYWGQGTLVTVSSAKTT

SEQ ID NO: 8948 - protein, 122 aa, Homo sapiens; identical to SEQ ID NO: 8873
  Heavy chain

SEQ ID NO: 8949 - protein, 123 aa, Homo sapiens
  Heavy chain
QVQLVESGGGVVQPGRSLRLSCAASGFTLSNYGMHWVRQAPGKGLEWVAVIWYDGRNKHYADSVEGRFTLSRDNSKNTLYLQMNSLRAEDTAVYYCARGGVWGSYFDYWGQGTLVTVSSAKTT

SEQ ID NO: 8950 - protein, 122 aa, Homo sapiens
  Heavy chain
QVQLVESGGGVVQPGRSLRLSCAASGFTFSSYGIHWVRQAPGKGLEWVAVIWYDGSNKYYADSVKGRFTISRDNSKNTLYLQMNSLRAEDTAVYYCARGSLLGPFDYWGQGTLVTVSSAKTT

SEQ ID NO: 8951 - protein, 120 aa, Homo sapiens
  Heavy chain
QVQLVQSGAEVKKPGASVKVSCKASGYTFTSYGISWVRQAPGQGLEWMGWISAYNGNTNYAQKLQGRVTMTTDTSTSTAYMELRSLRSDDTAVYYCGRWVRGVEYWGQGTLVTVSSAKTT

SEQ ID NO: 8952 - protein, 123 aa, Homo sapiens; identical to SEQ ID NO: 8947
  Heavy chain

SEQ ID NO: 8953 - protein, 126 aa, Homo sapiens
  Heavy chain
QVQLVESGGGVVQPGRSLRLSCAASGFTFSSYGMHWVRQAPGKGLEWVAVIWFDGNNKYYADSVKGRFTISRDNSKNTLYLQMNSLRADDTAVYYCARMLRGAPYYYGMDVWGQGTTITVSSAKTT

SEQ ID NO: 8954 - protein, 123 aa, Homo sapiens
  Heavy chain
QVQLVESGGGVVQPGRSLRLSCAASGFTFSSFGMHWVRQAPGKGLEWVAVIWYDGRNKYYVDSVKGRFTISRDNSNNTLYLQMNSLRAEDTAVYYCARGEFFGEFFDYWGQGTLVTVSSAKTT

SEQ ID NO: 8955 - protein, 122 aa, Homo sapiens; identical to SEQ ID NO: 8873
  Heavy chain

SEQ ID NO: 8956 - protein, 127 aa, Homo sapiens
  Heavy chain
QVQLVQSGAEVKKPGASVKVSCKASGYTFTSYYMHWVRQAPGQGLEWMGIINPSVGSTSYAQKFQGRVTMTRDTSTSTVYMELSSLRSEDTAVYYCAREVRVRGVIIPFFDYWDQGTLVTVSSAKTT

SEQ ID NO: 8957 - protein, 127 aa, Homo sapiens; identical to SEQ ID NO: 8956
  Heavy chain

SEQ ID NO: 8958 - protein, 131 aa, Homo sapiens
  Heavy chain
QLQLQESGPGLVKPSETLSLTCTVSGGSISSSSYYWGWIRQPPGKGLEWIGSIYYSGSTYYNPSLKSRVTISVDTSKNQFSLKLSSVTAADTAVYYCAGTYYYGSGSYSGYYYYYGMDVWGQGTTVTVSSA

SEQ ID NO: 8959 - protein, 123 aa, Homo sapiens; identical to SEQ ID NO: 8949
  Heavy chain

SEQ ID NO: 8960 - protein, 122 aa, Homo sapiens
  Heavy chain
QVQLVESGGGVVQPGRSLRLSCAASGFTFSSYGMHWVRQAPGKGLEWVAVIWYDGSNKYYADSVKGRFTISRDISKNTLYLQMNSLRAEDTSVYYCARGGLLGPFDYWGQGTLVTVSSAKTT

SEQ ID NO: 8961 - protein, 122 aa, Homo sapiens
  Heavy chain
QVQLVESGGGVVQPGRSLRLSCAASGFTFSSYGMHWVRQAPGKGLEWVAVIWYEGSNKYYADSVKGRFTISRDNSKNTLYLQMNSLRAEDTALYYCARAGLLGYFDYWGQGTLVTVSSAKTT

SEQ ID NO: 8962 - protein, 122 aa, Homo sapiens
  Heavy chain
QVQLVESGGGVVQPGRSLRLSCAASGFTFSSYGIHWVRQAPGKGLEWVAVIWYDGSNKHYADSVKGRFTISRDNSKNTLYLQMNSLRDEDTAVYYCARGGLIGPFDYWGQGTLVTVSSAKTT

SEQ ID NO: 8963 - protein, 122 aa, Homo sapiens
  Heavy chain
QVQLVESGGGVVQPGRSLRLSCAASGFTFSSYGMHWVRQAPGKGLEWVAVIWYDGSNKFYADSVKGRFTISSDNSKNTLYLQMNSLRAEDTAVYYCARGGHLGSFDYWGQGTLVTVSSAKTT

SEQ ID NO: 8964 - protein, 122 aa, Homo sapiens
  Heavy chain
QVQLVESGGGVVQPGRSLRLSCAASGFTFSSYGMHWVRQAPGKGLEWVAVIWYDGSNKYYADSVKGRFTFSRDNSKNTLYLQMNSLRAEDTAVYYCARGGLMGAFDYWGQGTLVTVSSAKTT

SEQ ID NO: 8965 - protein, 123 aa, Homo sapiens; identical to SEQ ID NO: 8947
  Heavy chain

SEQ ID NO: 8966 - protein, 120 aa, Homo sapiens; identical to SEQ ID NO: 8951
  Heavy chain

SEQ ID NO: 8967 - protein, 122 aa, Homo sapiens
  Heavy chain
QVQLVESGGGVVQPGRSLRLSCAASGFTFSSYGMHWVRQAPGKGLEWVAVVWYDGSNKHYADSLKGRLTISRDNSKNTLYLQMNSLRAEDTAVFYCARAGHLGPFDYWGQGTLVTVSSAKTT

SEQ ID NO: 8968 - protein, 123 aa, Homo sapiens; identical to SEQ ID NO: 8870
  Heavy chain

SEQ ID NO: 8969 - protein, 127 aa, Homo sapiens
  Heavy chain
QVQLVESGGGVVQPGRSLRLSCAASGFTFSSYGMHWVRQAPGKGLEWVALIWYDGSYTYYADSVKGRFTISRDNSKNTLYLQMNSLRAEDTAVYYCASAYYDILTGPYYFDYWGQGTLVTVSSAKTT

SEQ ID NO: 8970 - protein, 123 aa, Homo sapiens; identical to SEQ ID NO: 8872
  Heavy chain

SEQ ID NO: 8971 - protein, 122 aa, Homo sapiens; identical to SEQ ID NO: 8910
  Heavy chain

SEQ ID NO: 8972 - protein, 123 aa, Homo sapiens; identical to SEQ ID NO: 8870
  Heavy chain

SEQ ID NO: 8973 - protein, 122 aa, Homo sapiens
  Heavy chain
QLQLQESGPGLVKPSETLSLTCTVSGGSISSSSYYWGWIRQPPGKGLEWIGSIYYRGNTYLNPSLKSRVTISVDTSKNQFSLKLRSVTAADTAVYYCARRSAYDPYYFDYWGQGTLVTVSSA

SEQ ID NO: 8974 - protein, 122 aa, Homo sapiens
  Heavy chain
QVQLVESGGGVVQPGRSLRLSCAASGFTFSSYGMHWVRQAPGKGLEWVAVIWYDGRNKYYADSVKGRFTISRDNSKNTLYLQMNSLRAEDTAVYYCARGGLTGPFDYWGQGTLVTVSSAKTT

SEQ ID NO: 8975 - protein, 120 aa, Homo sapiens; identical to SEQ ID NO: 8951
  Heavy chain

SEQ ID NO: 8976 - protein, 122 aa, Homo sapiens; identical to SEQ ID NO: 8946
  Heavy chain

SEQ ID NO: 8977 - protein, 120 aa, Homo sapiens; identical to SEQ ID NO: 8951
  Heavy chain

SEQ ID NO: 8978 - protein, 122 aa, Homo sapiens; identical to SEQ ID NO: 8946
  Heavy chain

SEQ ID NO: 8979 - protein, 123 aa, Homo sapiens; identical to SEQ ID NO: 8949
  Heavy chain

SEQ ID NO: 8980 - protein, 124 aa, Homo sapiens
  Heavy chain
QVQLVESGGGVVQPERSLRLSCAASGFTFSSHGMHWVRQAPGKGLEWVAVIWYDGNNKYYADSVKGRFTISRDNSKNTLYLQMNSLRAEDTAVYYCARGGILAAGIFDYWGQGTLVTVSSAKTT

SEQ ID NO: 8981 - protein, 124 aa, Homo sapiens
  Heavy chain
QVQLVESGGGVVQPGRSLRLSCAASGFTFSSYGMHWVRQAPGKGLEWVAVIWYDGSYKYYADSVKGRFTISRDNSKNTLYLQMNSLRAEDTAVYYCARGSVVAAGLFDYWGQGTLVTVSSAKTT

SEQ ID NO: 8982 - protein, 123 aa, Homo sapiens; identical to SEQ ID NO: 8949
  Heavy chain

SEQ ID NO: 8983 - protein, 122 aa, Homo sapiens; identical to SEQ ID NO: 8973
  Heavy chain

SEQ ID NO: 8984 - protein, 120 aa, Homo sapiens
  Heavy chain
QVQLVQSGAEVKKPGASVKVSCKTSGYTFTSYGITWVRQAPGQGLEWMGWISAYNGNTNYAQKLQGRVTMTTDTSTSTAYMELRSLRSDDTAVYYCAKVSGYFDYWGQGTLVTVSSAKTT

SEQ ID NO: 8985 - protein, 123 aa, Homo sapiens; identical to SEQ ID NO: 8949
  Heavy chain

SEQ ID NO: 8986 - protein, 123 aa, Homo sapiens; identical to SEQ ID NO: 8947
  Heavy chain

SEQ ID NO: 8987 - protein, 122 aa, Homo sapiens; identical to SEQ ID NO: 8873
  Heavy chain

SEQ ID NO: 8988 - protein, 122 aa, Homo sapiens
  Heavy chain
QVQLVESGGGVVQPGRSLRLSCAASGFTFSRYGMHWVRQAPGKGLEWVAVIWYDGSNKYYADSVKGRFTISRDNSKNTLYLQMNSLRAEDTAVYYCARAGHLGAFDIWGQGTMVTVSSAKTT

SEQ ID NO: 8989 - protein, 123 aa, Homo sapiens; identical to SEQ ID NO: 8947
  Heavy chain

SEQ ID NO: 8990 - protein, 122 aa, Homo sapiens; identical to SEQ ID NO: 8910
  Heavy chain

SEQ ID NO: 8991 - protein, 122 aa, Homo sapiens; identical to SEQ ID NO: 8910
  Heavy chain

SEQ ID NO: 8992 - protein, 6 aa, Homo sapiens
  Light chain CDR1
QSISSY

SEQ ID NO: 8993 - protein, 6 aa, Homo sapiens
  Light chain CDR1
QGISNY

SEQ ID NO: 8994 - protein, 6 aa, Homo sapiens
  Light chain CDR1
QSVSSN

SEQ ID NO: 8995 - protein, 6 aa, Homo sapiens
  Light chain CDR1
QGIRND

SEQ ID NO: 8996 - protein, 6 aa, Homo sapiens
  Light chain CDR1
QGIRND

SEQ ID NO: 8997 - protein, 6 aa, Homo sapiens
  Light chain CDR1
QGIRND

SEQ ID NO: 8998 - protein, 6 aa, Homo sapiens
  Light chain CDR1
QGISSY

SEQ ID NO: 8999 - protein, 7 aa, Homo sapiens
  Light chain CDR1
QSVSSSY

SEQ ID NO: 9000 - protein, 6 aa, Homo sapiens
  Light chain CDR1
QGIRND

SEQ ID NO: 9001 - protein, 6 aa, Homo sapiens
  Light chain CDR1
QGIRND

SEQ ID NO: 9002 - protein, 6 aa, Homo sapiens
  Light chain CDR1
QGIRND

SEQ ID NO: 9003 - protein, 6 aa, Homo sapiens
  Light chain CDR1
QVIRND

SEQ ID NO: 9004 - protein, 7 aa, Homo sapiens
  Light chain CDR1
QSVSSSY

SEQ ID NO: 9005 - protein, 7 aa, Homo sapiens
  Light chain CDR1
QSVSSSY

SEQ ID NO: 9006 - protein, 6 aa, Homo sapiens
  Light chain CDR1
QGISNY

SEQ ID NO: 9007 - protein, 6 aa, Homo sapiens
  Light chain CDR1
QGIRND

SEQ ID NO: 9008 - protein, 6 aa, Homo sapiens
  Light chain CDR1
QGIRND

SEQ ID NO: 9009 - protein, 6 aa, Homo sapiens
  Light chain CDR1
QSISSY

SEQ ID NO: 9010 - protein, 6 aa, Homo sapiens
  Light chain CDR1
QGISRY

SEQ ID NO: 9011 - protein, 6 aa, Homo sapiens
  Light chain CDR1
QSISSY

SEQ ID NO: 9012 - protein, 6 aa, Homo sapiens
  Light chain CDR1
QSISSY

SEQ ID NO: 9013 - protein, 6 aa, Homo sapiens
  Light chain CDR1
QSISSY

SEQ ID NO: 9014 - protein, 6 aa, Homo sapiens
  Light chain CDR1
QGISSY

SEQ ID NO: 9015 - protein, 6 aa, Homo sapiens
  Light chain CDR1
QSISSY

SEQ ID NO: 9016 - protein, 6 aa, Homo sapiens
  Light chain CDR1
QGISSY

SEQ ID NO: 9017 - protein, 6 aa, Homo sapiens
  Light chain CDR1
QSISSY

SEQ ID NO: 9018 - protein, 6 aa, Homo sapiens
  Light chain CDR1
QGIRND

SEQ ID NO: 9019 - protein, 6 aa, Homo sapiens
  Light chain CDR1
QGIRND

SEQ ID NO: 9020 - protein, 7 aa, Homo sapiens
  Light chain CDR1
QSVSSSY

SEQ ID NO: 9021 - protein, 6 aa, Homo sapiens
  Light chain CDR1
QSISSY

SEQ ID NO: 9022 - protein, 6 aa, Homo sapiens
  Light chain CDR1
QDIRND

SEQ ID NO: 9023 - protein, 7 aa, Homo sapiens
  Light chain CDR1
QSVSSSY

SEQ ID NO: 9024 - protein, 6 aa, Homo sapiens
  Light chain CDR1
QSISSY

SEQ ID NO: 9025 - protein, 6 aa, Homo sapiens
  Light chain CDR1
QSISSY

SEQ ID NO: 9026 - protein, 6 aa, Homo sapiens
  Light chain CDR1
QGIRND

SEQ ID NO: 9027 - protein, 6 aa, Homo sapiens
  Light chain CDR1
QGISSY

SEQ ID NO: 9028 - protein, 6 aa, Homo sapiens
  Light chain CDR1
QSISSY

SEQ ID NO: 9029 - protein, 6 aa, Homo sapiens
  Light chain CDR1
QSISSY

SEQ ID NO: 9030 - protein, 7 aa, Homo sapiens
  Light chain CDR1
QSVSSSY

SEQ ID NO: 9031 - protein, 6 aa, Homo sapiens
  Light chain CDR1
QGIRND

SEQ ID NO: 9032 - protein, 7 aa, Homo sapiens
  Light chain CDR1
QSVSSSY

SEQ ID NO: 9033 - protein, 6 aa, Homo sapiens
  Light chain CDR1
QGIRND

SEQ ID NO: 9034 - protein, 6 aa, Homo sapiens
  Light chain CDR1
QSISSY

SEQ ID NO: 9035 - protein, 7 aa, Homo sapiens
  Light chain CDR1
QSVSSSY

SEQ ID NO: 9036 - protein, 6 aa, Homo sapiens
  Light chain CDR1
QGISSY

SEQ ID NO: 9037 - protein, 6 aa, Homo sapiens
  Light chain CDR1
QGIRND

SEQ ID NO: 9038 - protein, 6 aa, Homo sapiens
  Light chain CDR1
QSISSY

SEQ ID NO: 9039 - protein, 6 aa, Homo sapiens
  Light chain CDR1
QSISSY

SEQ ID NO: 9040 - protein, 7 aa, Homo sapiens
  Light chain CDR1
QSVSSSY

SEQ ID NO: 9041 - protein, 7 aa, Homo sapiens
  Light chain CDR1
QSVSSSY

SEQ ID NO: 9042 - protein, 6 aa, Homo sapiens
  Light chain CDR1
QDISNY

SEQ ID NO: 9043 - protein, 7 aa, Homo sapiens
  Light chain CDR1
QSVSSSY

SEQ ID NO: 9044 - protein, 7 aa, Homo sapiens
  Light chain CDR1
QSVSSSY

SEQ ID NO: 9045 - protein, 11 aa, Homo sapiens
  Light chain CDR1
QSLLHSNGYNY

SEQ ID NO: 9046 - protein, 6 aa, Homo sapiens
  Light chain CDR1
QSISSY

SEQ ID NO: 9047 - protein, 7 aa, Homo sapiens
  Light chain CDR1
QSVSSSY

SEQ ID NO: 9048 - protein, 7 aa, Homo sapiens
  Light chain CDR1
QSVSSSY

SEQ ID NO: 9049 - protein, 7 aa, Homo sapiens
  Light chain CDR1
QSISSSY

SEQ ID NO: 9050 - protein, 6 aa, Homo sapiens
  Light chain CDR1
QSISSY

SEQ ID NO: 9051 - protein, 7 aa, Homo sapiens
  Light chain CDR1
QSVSSSS

SEQ ID NO: 9052 - protein, 6 aa, Homo sapiens
  Light chain CDR1
QSISSY

SEQ ID NO: 9053 - protein, 7 aa, Homo sapiens
  Light chain CDR1
QSVSSSY

SEQ ID NO: 9054 - protein, 7 aa, Homo sapiens
  Light chain CDR1
QSVSSSY

SEQ ID NO: 9055 - protein, 7 aa, Homo sapiens
  Light chain CDR1
QSVSSSY

SEQ ID NO: 9056 - protein, 7 aa, Homo sapiens
  Light chain CDR1
QSVSSSY

SEQ ID NO: 9057 - protein, 11 aa, Homo sapiens
  Light chain CDR1
QSLLHSNGYNY

SEQ ID NO: 9058 - protein, 7 aa, Homo sapiens
  Light chain CDR1
QSVSSSY

SEQ ID NO: 9059 - protein, 6 aa, Homo sapiens
  Light chain CDR1
QSISSY

SEQ ID NO: 9060 - protein, 6 aa, Homo sapiens
  Light chain CDR1
QSISSY

SEQ ID NO: 9061 - protein, 6 aa, Homo sapiens
  Light chain CDR1
QSISSF

SEQ ID NO: 9062 - protein, 7 aa, Homo sapiens
  Light chain CDR1
QSVSSSY

SEQ ID NO: 9063 - protein, 6 aa, Homo sapiens
  Light chain CDR1
QSISSF

SEQ ID NO: 9064 - protein, 6 aa, Homo sapiens
  Light chain CDR1
QSISSY

SEQ ID NO: 9065 - protein, 7 aa, Homo sapiens
  Light chain CDR1
QSVSSSY

SEQ ID NO: 9066 - protein, 6 aa, Homo sapiens
  Light chain CDR1
QSISSY

SEQ ID NO: 9067 - protein, 7 aa, Homo sapiens
  Light chain CDR1
QSVSSSY

SEQ ID NO: 9068 - protein, 6 aa, Homo sapiens
  Light chain CDR1
QSISSY

SEQ ID NO: 9069 - protein, 7 aa, Homo sapiens
  Light chain CDR1
QSVSSSY

SEQ ID NO: 9070 - protein, 7 aa, Homo sapiens
  Light chain CDR1
QSVSSSY

SEQ ID NO: 9071 - protein, 6 aa, Homo sapiens
  Light chain CDR1
QSISSY

SEQ ID NO: 9072 - protein, 6 aa, Homo sapiens
  Light chain CDR1
QSISSY

SEQ ID NO: 9073 - protein, 7 aa, Homo sapiens
  Light chain CDR1
QSVSSSY

SEQ ID NO: 9074 - protein, 6 aa, Homo sapiens
  Light chain CDR1
QGISSY

SEQ ID NO: 9075 - protein, 11 aa, Homo sapiens
  Light chain CDR1
QSLLHSNGYNY

SEQ ID NO: 9076 - protein, 7 aa, Homo sapiens
  Light chain CDR1
QSVSSSY

SEQ ID NO: 9077 - protein, 7 aa, Homo sapiens
  Light chain CDR1
QSVSSSY

SEQ ID NO: 9078 - protein, 7 aa, Homo sapiens
  Light chain CDR1
QRAGSSY

SEQ ID NO: 9079 - protein, 6 aa, Homo sapiens
  Light chain CDR1
QGIRND

SEQ ID NO: 9080 - protein, 6 aa, Homo sapiens
  Light chain CDR1
QGIRND

SEQ ID NO: 9081 - protein, 11 aa, Homo sapiens
  Light chain CDR1
QSLLHSNGYNY

SEQ ID NO: 9082 - protein, 7 aa, Homo sapiens
  Light chain CDR1
QSVSSSY

SEQ ID NO: 9083 - protein, 6 aa, Homo sapiens
  Light chain CDR1
QGIRND

SEQ ID NO: 9084 - protein, 6 aa, Homo sapiens
  Light chain CDR1
QGIRND

SEQ ID NO: 9085 - protein, 7 aa, Homo sapiens
  Light chain CDR1
QRAGSSY

SEQ ID NO: 9086 - protein, 6 aa, Homo sapiens
  Light chain CDR1
QGIRND

SEQ ID NO: 9087 - protein, 6 aa, Homo sapiens
  Light chain CDR1
QGIRND

SEQ ID NO: 9088 - protein, 6 aa, Homo sapiens
  Light chain CDR1
QGISSY

SEQ ID NO: 9089 - protein, 6 aa, Homo sapiens
  Light chain CDR1
QSISSY

SEQ ID NO: 9090 - protein, 6 aa, Homo sapiens
  Light chain CDR1
QGIRND

SEQ ID NO: 9091 - protein, 11 aa, Homo sapiens
  Light chain CDR1
QSLLHSNGYNY

SEQ ID NO: 9092 - protein, 6 aa, Homo sapiens
  Light chain CDR1
QGIRND

SEQ ID NO: 9093 - protein, 6 aa, Homo sapiens
  Light chain CDR1
QGIRND

SEQ ID NO: 9094 - protein, 6 aa, Homo sapiens
  Light chain CDR1
QGIRND

SEQ ID NO: 9095 - protein, 7 aa, Homo sapiens
  Light chain CDR1
QSVSSSY

SEQ ID NO: 9096 - protein, 6 aa, Homo sapiens
  Light chain CDR1
QGIRND

SEQ ID NO: 9097 - protein, 6 aa, Homo sapiens
  Light chain CDR1
QGISSY

SEQ ID NO: 9098 - protein, 6 aa, Homo sapiens
  Light chain CDR1
QGIRND

SEQ ID NO: 9099 - protein, 6 aa, Homo sapiens
  Light chain CDR1
QGIRSY

SEQ ID NO: 9100 - protein, 6 aa, Homo sapiens
  Light chain CDR1
QGIRND

SEQ ID NO: 9101 - protein, 6 aa, Homo sapiens
  Light chain CDR1
QGIRND

SEQ ID NO: 9102 - protein, 6 aa, Homo sapiens
  Light chain CDR1
QSISSY

SEQ ID NO: 9103 - protein, 7 aa, Homo sapiens
  Light chain CDR1
QSVSSSY

SEQ ID NO: 9104 - protein, 6 aa, Homo sapiens
  Light chain CDR1
QSISSY

SEQ ID NO: 9105 - protein, 6 aa, Homo sapiens
  Light chain CDR1
QSISSY

SEQ ID NO: 9106 - protein, 6 aa, Homo sapiens
  Light chain CDR1
QSISSY

SEQ ID NO: 9107 - protein, 6 aa, Homo sapiens
  Light chain CDR1
QGIRND

SEQ ID NO: 9108 - protein, 6 aa, Homo sapiens
  Light chain CDR1
QGIRND

SEQ ID NO: 9109 - protein, 6 aa, Homo sapiens
  Light chain CDR1
QGIRND

SEQ ID NO: 9110 - protein, 6 aa, Homo sapiens
  Light chain CDR1
QSISSY

SEQ ID NO: 9111 - protein, 7 aa, Homo sapiens
  Light chain CDR1
QRAGSSY

SEQ ID NO: 9112 - protein, 6 aa, Homo sapiens
  Light chain CDR1
QGIRND

SEQ ID NO: 9113 - protein, 7 aa, Homo sapiens
  Light chain CDR1
QSVSSSY

SEQ ID NO: 9114 - protein, 6 aa, Homo sapiens
  Light chain CDR1
QGIRND

SEQ ID NO: 9115 - protein, 6 aa, Homo sapiens
  Light chain CDR1
QGISSY

SEQ ID NO: 9116 - protein, 6 aa, Homo sapiens
  Light chain CDR1
QGIRND

SEQ ID NO: 9117 - protein, 6 aa, Homo sapiens
  Light chain CDR1
QGIRND

SEQ ID NO: 9118 - protein, 6 aa, Homo sapiens
  Light chain CDR1
QGISSY

SEQ ID NO: 9119 - protein, 7 aa, Homo sapiens
  Light chain CDR1
QSVSSSY

SEQ ID NO: 9120 - protein, 6 aa, Homo sapiens
  Light chain CDR1
QGISSY

SEQ ID NO: 9121 - protein, 11 aa, Homo sapiens
  Light chain CDR1
QSLLHSNGYNY

SEQ ID NO: 9122 - protein, 6 aa, Homo sapiens
  Light chain CDR1
QGIRND

SEQ ID NO: 9123 - protein, 7 aa, Homo sapiens
  Light chain CDR1
QSVSSSY

SEQ ID NO: 9124 - protein, 6 aa, Homo sapiens
  Light chain CDR1
QGISND

SEQ ID NO: 9125 - protein, 6 aa, Homo sapiens
  Light chain CDR1
QDITND

SEQ ID NO: 9126 - protein, 7 aa, Homo sapiens
  Light chain CDR1
QSVSSNY

SEQ ID NO: 9127 - protein, 6 aa, Homo sapiens
  Light chain CDR1
QDITND

SEQ ID NO: 9128 - protein, 7 aa, Homo sapiens
  Light chain CDR1
QSVSSNY

SEQ ID NO: 9129 - protein, 7 aa, Homo sapiens
  Light chain CDR1
QSVSSSY

SEQ ID NO: 9130 - protein, 7 aa, Homo sapiens
  Light chain CDR1
QSVSSSY

SEQ ID NO: 9131 - protein, 7 aa, Homo sapiens
  Light chain CDR1
QSVSSSY

SEQ ID NO: 9132 - protein, 6 aa, Homo sapiens
  Light chain CDR1
QDISRL

SEQ ID NO: 9133 - protein, 6 aa, Homo sapiens
  Light chain CDR1
QGINNY

SEQ ID NO: 9134 - protein, 7 aa, Homo sapiens
  Light chain CDR1
QSVSSNY

SEQ ID NO: 9135 - protein, 6 aa, Homo sapiens
  Light chain CDR1
QDISSF

SEQ ID NO: 9136 - protein, 7 aa, Homo sapiens
  Light chain CDR1
QSVSSSY

SEQ ID NO: 9137 - protein, 7 aa, Homo sapiens
  Light chain CDR1
QSVSSNY

SEQ ID NO: 9138 - protein, 7 aa, Homo sapiens
  Light chain CDR1
QSVSSNY

SEQ ID NO: 9139 - protein, 7 aa, Homo sapiens
  Light chain CDR1
QSVSSSY

SEQ ID NO: 9140 - protein, 6 aa, Homo sapiens
  Light chain CDR1
QSIGSS

SEQ ID NO: 9141 - protein, 5 aa, Homo sapiens
  Light chain CDR1
QSTNY

SEQ ID NO: 9142 - protein, 6 aa, Homo sapiens
  Light chain CDR1
QSIGSS

SEQ ID NO: 9143 - protein, 7 aa, Homo sapiens
  Light chain CDR1
QSVSSSY

SEQ ID NO: 9144 - protein, 7 aa, Homo sapiens
  Light chain CDR1
QSISSSY

SEQ ID NO: 9145 - protein, 6 aa, Homo sapiens
  Light chain CDR1
QDITND

SEQ ID NO: 9146 - protein, 6 aa, Homo sapiens
  Light chain CDR1
QDITND

SEQ ID NO: 9147 - protein, 6 aa, Homo sapiens
  Light chain CDR1
QDISND

SEQ ID NO: 9148 - protein, 6 aa, Homo sapiens
  Light chain CDR1
QGINNY

SEQ ID NO: 9149 - protein, 7 aa, Homo sapiens
  Light chain CDR1
QSVSSSY

SEQ ID NO: 9150 - protein, 6 aa, Homo sapiens
  Light chain CDR1
QGISSF

SEQ ID NO: 9151 - protein, 6 aa, Homo sapiens
  Light chain CDR1
QDITND

SEQ ID NO: 9152 - protein, 6 aa, Homo sapiens
  Light chain CDR1
QGISSY

SEQ ID NO: 9153 - protein, 7 aa, Homo sapiens
  Light chain CDR1
QSVSSSY

SEQ ID NO: 9154 - protein, 6 aa, Homo sapiens
  Light chain CDR1
QGINNY

SEQ ID NO: 9155 - protein, 7 aa, Homo sapiens
  Light chain CDR1
QSISSSY

SEQ ID NO: 9156 - protein, 7 aa, Homo sapiens
  Light chain CDR1
QSVSSSY

SEQ ID NO: 9157 - protein, 7 aa, Homo sapiens
  Light chain CDR1
QSVSSSY

SEQ ID NO: 9158 - protein, 7 aa, Homo sapiens
  Light chain CDR1
QSVSSNY

SEQ ID NO: 9159 - protein, 7 aa, Homo sapiens
  Light chain CDR1
QSVSSSY

SEQ ID NO: 9160 - protein, 6 aa, Homo sapiens
  Light chain CDR1
QDITND

SEQ ID NO: 9161 - protein, 7 aa, Homo sapiens
  Light chain CDR1
QSVSSSY

SEQ ID NO: 9162 - protein, 6 aa, Homo sapiens
  Light chain CDR1
QGIGND

SEQ ID NO: 9163 - protein, 7 aa, Homo sapiens
  Light chain CDR1
QSVSSSY

SEQ ID NO: 9164 - protein, 7 aa, Homo sapiens
  Light chain CDR1
QSISSSY

SEQ ID NO: 9165 - protein, 7 aa, Homo sapiens
  Light chain CDR1
QSVSSNY

SEQ ID NO: 9166 - protein, 7 aa, Homo sapiens
  Light chain CDR1
QSVSSSY

SEQ ID NO: 9167 - protein, 7 aa, Homo sapiens
  Light chain CDR1
QSVSSSY

SEQ ID NO: 9168 - protein, 6 aa, Homo sapiens
  Light chain CDR1
QGISND

SEQ ID NO: 9169 - protein, 7 aa, Homo sapiens
  Light chain CDR1
QSVSSNY

SEQ ID NO: 9170 - protein, 7 aa, Homo sapiens
  Light chain CDR1
PSISSSY

SEQ ID NO: 9171 - protein, 7 aa, Homo sapiens
  Light chain CDR1
QSVSSSY

SEQ ID NO: 9172 - protein, 6 aa, Homo sapiens
  Light chain CDR1
QDITND

SEQ ID NO: 9173 - protein, 6 aa, Homo sapiens
  Light chain CDR1
QGISND

SEQ ID NO: 9174 - protein, 7 aa, Homo sapiens
  Light chain CDR1
QSVSSSY

SEQ ID NO: 9175 - protein, 6 aa, Homo sapiens
  Light chain CDR1
QNIGSS

SEQ ID NO: 9176 - protein, 6 aa, Homo sapiens
  Light chain CDR1
QDISND

SEQ ID NO: 9177 - protein, 6 aa, Homo sapiens
  Light chain CDR1
QDISRL

SEQ ID NO: 9178 - protein, 6 aa, Homo sapiens
  Light chain CDR1
QDISRL

SEQ ID NO: 9179 - protein, 7 aa, Homo sapiens
  Light chain CDR1
QSVSSSY

SEQ ID NO: 9180 - protein, 7 aa, Homo sapiens
  Light chain CDR1
QSVSSSY

SEQ ID NO: 9181 - protein, 7 aa, Homo sapiens
  Light chain CDR1
QSVSSNF

SEQ ID NO: 9182 - protein, 6 aa, Homo sapiens
  Light chain CDR1
QGISND

SEQ ID NO: 9183 - protein, 6 aa, Homo sapiens
  Light chain CDR1
QDISSF

SEQ ID NO: 9184 - protein, 6 aa, Homo sapiens
  Light chain CDR1
QDITND

SEQ ID NO: 9185 - protein, 7 aa, Homo sapiens
  Light chain CDR1
QSVSSSY

SEQ ID NO: 9186 - protein, 6 aa, Homo sapiens
  Light chain CDR1
QDISRL

SEQ ID NO: 9187 - protein, 6 aa, Homo sapiens
  Light chain CDR1
QGISSF

SEQ ID NO: 9188 - protein, 7 aa, Homo sapiens
  Light chain CDR1
QSVSSSY

SEQ ID NO: 9189 - protein, 7 aa, Homo sapiens
  Light chain CDR1
QSVSSSY

SEQ ID NO: 9190 - protein, 6 aa, Homo sapiens
  Light chain CDR1
QDITND

SEQ ID NO: 9191 - protein, 6 aa, Homo sapiens
  Light chain CDR1
QGISND

SEQ ID NO: 9192 - protein, 7 aa, Homo sapiens
  Light chain CDR1
QSVSSSY

SEQ ID NO: 9193 - protein, 7 aa, Homo sapiens
  Light chain CDR1
QSVSSSY

SEQ ID NO: 9194 - protein, 6 aa, Homo sapiens
  Light chain CDR1
QGINND

SEQ ID NO: 9195 - protein, 7 aa, Homo sapiens
  Light chain CDR1
QSVSSSY

SEQ ID NO: 9196 - protein, 6 aa, Homo sapiens
  Light chain CDR1
QDISRL

SEQ ID NO: 9197 - protein, 7 aa, Homo sapiens
  Light chain CDR1
QSVSSSY

SEQ ID NO: 9198 - protein, 7 aa, Homo sapiens
  Light chain CDR1
QSVSSSY

SEQ ID NO: 9199 - protein, 7 aa, Homo sapiens
  Light chain CDR1
QSVSSNY

SEQ ID NO: 9200 - protein, 7 aa, Homo sapiens
  Light chain CDR1
QSVSSSY

SEQ ID NO: 9201 - protein, 6 aa, Homo sapiens
  Light chain CDR1
QDITND

SEQ ID NO: 9202 - protein, 7 aa, Homo sapiens
  Light chain CDR1
QSVSSSY

SEQ ID NO: 9203 - protein, 7 aa, Homo sapiens
  Light chain CDR1
QSVSSSY

SEQ ID NO: 9204 - protein, 7 aa, Homo sapiens
  Light chain CDR1
QSVSSNF

SEQ ID NO: 9205 - protein, 6 aa, Homo sapiens
  Light chain CDR1
QGISND

SEQ ID NO: 9206 - protein, 6 aa, Homo sapiens
  Light chain CDR1
QGISND

SEQ ID NO: 9207 - protein, 6 aa, Homo sapiens
  Light chain CDR1
QDISRL

SEQ ID NO: 9208 - protein, 7 aa, Homo sapiens
  Light chain CDR1
QSVSGSY

SEQ ID NO: 9209 - protein, 6 aa, Homo sapiens
  Light chain CDR1
QGISSY

SEQ ID NO: 9210 - protein, 7 aa, Homo sapiens
  Light chain CDR1
QSVSSSY

SEQ ID NO: 9211 - protein, 7 aa, Homo sapiens
  Light chain CDR1
QSVSSSY

SEQ ID NO: 9212 - protein, 7 aa, Homo sapiens
  Light chain CDR1
QSVSSSY

SEQ ID NO: 9213 - protein, 6 aa, Homo sapiens
  Light chain CDR1
QGISND

SEQ ID NO: 9214 - protein, 6 aa, Homo sapiens
  Light chain CDR1
QGISND

SEQ ID NO: 9215 - protein, 6 aa, Homo sapiens
  Light chain CDR1
QGISND

SEQ ID NO: 9216 - protein, 6 aa, Homo sapiens
  Light chain CDR1
QGISND

SEQ ID NO: 9217 - protein, 7 aa, Homo sapiens
  Light chain CDR1
QSVSSSY

SEQ ID NO: 9218 - protein, 6 aa, Homo sapiens
  Light chain CDR1
QGISND

SEQ ID NO: 9219 - protein, 6 aa, Homo sapiens
  Light chain CDR1
QGISND

SEQ ID NO: 9220 - protein, 6 aa, Homo sapiens
  Light chain CDR1
QGISND

SEQ ID NO: 9221 - protein, 6 aa, Homo sapiens
  Light chain CDR1
QGISND

SEQ ID NO: 9222 - protein, 6 aa, Homo sapiens
  Light chain CDR1
QDISND

SEQ ID NO: 9223 - protein, 6 aa, Homo sapiens
  Light chain CDR1
QGISSY

SEQ ID NO: 9224 - protein, 6 aa, Homo sapiens
  Light chain CDR1
QGISND

SEQ ID NO: 9225 - protein, 7 aa, Homo sapiens
  Light chain CDR1
QSVSSSY

SEQ ID NO: 9226 - protein, 6 aa, Homo sapiens
  Light chain CDR1
QGISND

SEQ ID NO: 9227 - protein, 7 aa, Homo sapiens
  Light chain CDR1
QSVSSSY

SEQ ID NO: 9228 - protein, 7 aa, Homo sapiens
  Light chain CDR1
QSVSSSY

SEQ ID NO: 9229 - protein, 6 aa, Homo sapiens
  Light chain CDR1
QGISND

SEQ ID NO: 9230 - protein, 7 aa, Homo sapiens
  Light chain CDR1
QSVSSSY

SEQ ID NO: 9231 - protein, 7 aa, Homo sapiens
  Light chain CDR1
QSVSSSY

SEQ ID NO: 9232 - protein, 7 aa, Homo sapiens
  Light chain CDR1
QSVSSSY

SEQ ID NO: 9233 - protein, 7 aa, Homo sapiens
  Light chain CDR1
QSGSSSY

SEQ ID NO: 9234 - protein, 7 aa, Homo sapiens
  Light chain CDR1
QSVSSSY

SEQ ID NO: 9235 - protein, 7 aa, Homo sapiens
  Light chain CDR1
QSGSSSY

SEQ ID NO: 9236 - protein, 7 aa, Homo sapiens
  Light chain CDR1
QSVSSSY

SEQ ID NO: 9237 - protein, 11 aa, Homo sapiens
  Light chain CDR1
QSLLHSNGYNY

SEQ ID NO: 9238 - protein, 7 aa, Homo sapiens
  Light chain CDR1
QSDSSSY

SEQ ID NO: 9239 - protein, 6 aa, Homo sapiens
  Light chain CDR1
QSISSY

SEQ ID NO: 9240 - protein, 11 aa, Homo sapiens
  Light chain CDR1
QSLLHSNGYNY

SEQ ID NO: 9241 - protein, 6 aa, Homo sapiens
  Light chain CDR1
QSIGSS

SEQ ID NO: 9242 - protein, 7 aa, Homo sapiens
  Light chain CDR1
QSVSSSY

SEQ ID NO: 9243 - protein, 6 aa, Homo sapiens
  Light chain CDR1
QGISNY

SEQ ID NO: 9244 - protein, 7 aa, Homo sapiens
  Light chain CDR1
QSVSSSY

SEQ ID NO: 9245 - protein, 7 aa, Homo sapiens
  Light chain CDR1
QSVSSTY

SEQ ID NO: 9246 - protein, 7 aa, Homo sapiens
  Light chain CDR1
QSVSSSY

SEQ ID NO: 9247 - protein, 7 aa, Homo sapiens
  Light chain CDR1
QSGSSSY

SEQ ID NO: 9248 - protein, 7 aa, Homo sapiens
  Light chain CDR1
QSVSSSY

SEQ ID NO: 9249 - protein, 7 aa, Homo sapiens
  Light chain CDR1
QSGSSSY

SEQ ID NO: 9250 - protein, 7 aa, Homo sapiens
  Light chain CDR1
QSVSSSY

SEQ ID NO: 9251 - protein, 7 aa, Homo sapiens
  Light chain CDR1
QSVSSSY

SEQ ID NO: 9252 - protein, 7 aa, Homo sapiens
  Light chain CDR1
QSVSSSY

SEQ ID NO: 9253 - protein, 7 aa, Homo sapiens
  Light chain CDR1
QSVSSSY

SEQ ID NO: 9254 - protein, 7 aa, Homo sapiens
  Light chain CDR1
QSGSSSY

SEQ ID NO: 9255 - protein, 7 aa, Homo sapiens
  Light chain CDR1
QSVSSSY

SEQ ID NO: 9256 - protein, 7 aa, Homo sapiens
  Light chain CDR1
QSVSSSY

SEQ ID NO: 9257 - protein, 7 aa, Homo sapiens
  Light chain CDR1
QSGSSSY

SEQ ID NO: 9258 - protein, 7 aa, Homo sapiens
  Light chain CDR1
QSVSSSY

SEQ ID NO: 9259 - protein, 7 aa, Homo sapiens
  Light chain CDR1
QSVSSSY

SEQ ID NO: 9260 - protein, 7 aa, Homo sapiens
  Light chain CDR1
QSVSSSY

SEQ ID NO: 9261 - protein, 7 aa, Homo sapiens
  Light chain CDR1
QSGSSSY

SEQ ID NO: 9262 - protein, 7 aa, Homo sapiens
  Light chain CDR1
QSVSSTY

SEQ ID NO: 9263 - protein, 7 aa, Homo sapiens
  Light chain CDR1
QSGSSSY

SEQ ID NO: 9264 - protein, 11 aa, Homo sapiens
  Light chain CDR1
QSLLHSNGYNY

SEQ ID NO: 9265 - protein, 7 aa, Homo sapiens
  Light chain CDR1
QSVSSSY

SEQ ID NO: 9266 - protein, 7 aa, Homo sapiens
  Light chain CDR1
QSVSSSY

SEQ ID NO: 9267 - protein, 7 aa, Homo sapiens
  Light chain CDR1
QSVSSSY

SEQ ID NO: 9268 - protein, 7 aa, Homo sapiens
  Light chain CDR1
QSVSSSY

SEQ ID NO: 9269 - protein, 7 aa, Homo sapiens
  Light chain CDR1
QSVSSSY

SEQ ID NO: 9270 - protein, 7 aa, Homo sapiens
  Light chain CDR1
QTISSSY

SEQ ID NO: 9271 - protein, 7 aa, Homo sapiens
  Light chain CDR1
QSVSSSY

SEQ ID NO: 9272 - protein, 7 aa, Homo sapiens
  Light chain CDR1
QSVSSSY

SEQ ID NO: 9273 - protein, 5 aa, Homo sapiens
  Light chain CDR1
QSVSY

SEQ ID NO: 9274 - protein, 7 aa, Homo sapiens
  Light chain CDR1
QSVSSSY

SEQ ID NO: 9275 - protein, 5 aa, Homo sapiens
  Light chain CDR1
QSVSY

SEQ ID NO: 9276 - protein, 7 aa, Homo sapiens
  Light chain CDR1
QSVSSSY

SEQ ID NO: 9277 - protein, 7 aa, Homo sapiens
  Light chain CDR1
QSVSSSY

SEQ ID NO: 9278 - protein, 7 aa, Homo sapiens
  Light chain CDR1
QSVSSSY

SEQ ID NO: 9279 - protein, 7 aa, Homo sapiens
  Light chain CDR1
QTISSSY

SEQ ID NO: 9280 - protein, 7 aa, Homo sapiens
  Light chain CDR1
QSVSSSY

SEQ ID NO: 9281 - protein, 7 aa, Homo sapiens
  Light chain CDR1
QSVSSSY

SEQ ID NO: 9282 - protein, 7 aa, Homo sapiens
  Light chain CDR1
QSVSSSY

SEQ ID NO: 9283 - protein, 7 aa, Homo sapiens
  Light chain CDR1
QSVSSSY

SEQ ID NO: 9284 - protein, 7 aa, Homo sapiens
  Light chain CDR1
QSVSSSY

SEQ ID NO: 9285 - protein, 7 aa, Homo sapiens
  Light chain CDR1
QSVSSSY

SEQ ID NO: 9286 - protein, 7 aa, Homo sapiens
  Light chain CDR1
QSVSSSY

SEQ ID NO: 9287 - protein, 7 aa, Homo sapiens
  Light chain CDR1
QSVSSSY

SEQ ID NO: 9288 - protein, 7 aa, Homo sapiens
  Light chain CDR1
QSVSSSY

SEQ ID NO: 9289 - protein, 7 aa, Homo sapiens
  Light chain CDR1
QSVSSSY

SEQ ID NO: 9290 - protein, 7 aa, Homo sapiens
  Light chain CDR1
QSVSSSY

SEQ ID NO: 9291 - protein, 7 aa, Homo sapiens
  Light chain CDR1
QSVSSSY

SEQ ID NO: 9292 - protein, 7 aa, Homo sapiens
  Light chain CDR1
QSVSSSY

SEQ ID NO: 9293 - protein, 7 aa, Homo sapiens
  Light chain CDR1
QSVSSSY

SEQ ID NO: 9294 - protein, 7 aa, Homo sapiens
  Light chain CDR1
QSVSSTY

SEQ ID NO: 9295 - protein, 7 aa, Homo sapiens
  Light chain CDR1
QSVSSSY

SEQ ID NO: 9296 - protein, 6 aa, Homo sapiens
  Light chain CDR1
QSISSY

SEQ ID NO: 9297 - protein, 7 aa, Homo sapiens
  Light chain CDR1
QSVSSSY

SEQ ID NO: 9298 - protein, 6 aa, Homo sapiens
  Light chain CDR1
QGISNY

SEQ ID NO: 9299 - protein, 7 aa, Homo sapiens
  Light chain CDR1
QSVSSSY

SEQ ID NO: 9300 - protein, 7 aa, Homo sapiens
  Light chain CDR1
QSGSSSY

SEQ ID NO: 9301 - protein, 7 aa, Homo sapiens
  Light chain CDR1
QSVSSSY

SEQ ID NO: 9302 - protein, 7 aa, Homo sapiens
  Light chain CDR1
QSVSSSY

SEQ ID NO: 9303 - protein, 7 aa, Homo sapiens
  Light chain CDR1
QSVSSSY

SEQ ID NO: 9304 - protein, 6 aa, Homo sapiens
  Light chain CDR1
QSISSY

SEQ ID NO: 9305 - protein, 7 aa, Homo sapiens
  Light chain CDR1
QTISSSY

SEQ ID NO: 9306 - protein, 5 aa, Homo sapiens
  Light chain CDR1
QSVSY

SEQ ID NO: 9307 - protein, 12 aa, Homo sapiens
  Light chain CDR1
QSVLYRSNNKNY

SEQ ID NO: 9308 - protein, 7 aa, Homo sapiens
  Light chain CDR1
QSVSSSY

SEQ ID NO: 9309 - protein, 12 aa, Homo sapiens
  Light chain CDR1
QSVLYSSNNKNY

SEQ ID NO: 9310 - protein, 6 aa, Homo sapiens
  Light chain CDR1
QSIGSS

SEQ ID NO: 9311 - protein, 11 aa, Homo sapiens
  Light chain CDR1
QSLLHSNGLNY

SEQ ID NO: 9312 - protein, 11 aa, Homo sapiens
  Light chain CDR1
QSLLHSNGYNY

SEQ ID NO: 9313 - protein, 7 aa, Homo sapiens
  Light chain CDR1
QSVSSSY

SEQ ID NO: 9314 - protein, 6 aa, Homo sapiens
  Light chain CDR1
QGISNY

SEQ ID NO: 9315 - protein, 7 aa, Homo sapiens
  Light chain CDR1
QSVSSSY

SEQ ID NO: 9316 - protein, 7 aa, Homo sapiens
  Light chain CDR1
QSVSSSY

SEQ ID NO: 9317 - protein, 7 aa, Homo sapiens
  Light chain CDR1
QSVSSSY

SEQ ID NO: 9318 - protein, 7 aa, Homo sapiens
  Light chain CDR1
QSVSSSY

SEQ ID NO: 9319 - protein, 7 aa, Homo sapiens
  Light chain CDR1
QSVSSSY

SEQ ID NO: 9320 - protein, 7 aa, Homo sapiens
  Light chain CDR1
QSVSSNY

SEQ ID NO: 9321 - protein, 7 aa, Homo sapiens
  Light chain CDR1
QSVSSSY

SEQ ID NO: 9322 - protein, 7 aa, Homo sapiens
  Light chain CDR1
QSVSSSY

SEQ ID NO: 9323 - protein, 7 aa, Homo sapiens
  Light chain CDR1
QSFSSSY

SEQ ID NO: 9324 - protein, 6 aa, Homo sapiens
  Light chain CDR1
QSISSY

SEQ ID NO: 9325 - protein, 7 aa, Homo sapiens
  Light chain CDR1
QSVSSSY

SEQ ID NO: 9326 - protein, 7 aa, Homo sapiens
  Light chain CDR1
QSVSSSY

SEQ ID NO: 9327 - protein, 7 aa, Homo sapiens
  Light chain CDR1
QSVSSSY

SEQ ID NO: 9328 - protein, 7 aa, Homo sapiens
  Light chain CDR1
QSVSSSY

SEQ ID NO: 9329 - protein, 6 aa, Homo sapiens
  Light chain CDR1
QGIRYD

SEQ ID NO: 9330 - protein, 7 aa, Homo sapiens
  Light chain CDR1
QSVSSSY

SEQ ID NO: 9331 - protein, 7 aa, Homo sapiens
  Light chain CDR1
QTISSSY

SEQ ID NO: 9332 - protein, 7 aa, Homo sapiens
  Light chain CDR1
QSVSSSY

SEQ ID NO: 9333 - protein, 7 aa, Homo sapiens
  Light chain CDR1
QTISSSY

SEQ ID NO: 9334 - protein, 7 aa, Homo sapiens
  Light chain CDR1
QSVSSSY

SEQ ID NO: 9335 - protein, 7 aa, Homo sapiens
  Light chain CDR1
QTVSSIY

SEQ ID NO: 9336 - protein, 7 aa, Homo sapiens
  Light chain CDR1
QSVSSSY

SEQ ID NO: 9337 - protein, 7 aa, Homo sapiens
  Light chain CDR1
QSVSSSY

SEQ ID NO: 9338 - protein, 7 aa, Homo sapiens
  Light chain CDR1
QSVSSSY

SEQ ID NO: 9339 - protein, 7 aa, Homo sapiens
  Light chain CDR1
QSVSSSY

SEQ ID NO: 9340 - protein, 7 aa, Homo sapiens
  Light chain CDR1
QSVSSSY

SEQ ID NO: 9341 - protein, 7 aa, Homo sapiens
  Light chain CDR1
QSVSSSY

SEQ ID NO: 9342 - protein, 7 aa, Homo sapiens
  Light chain CDR1
QSVSSSC

SEQ ID NO: 9343 - protein, 7 aa, Homo sapiens
  Light chain CDR1
QSVSSSC

SEQ ID NO: 9344 - protein, 7 aa, Homo sapiens
  Light chain CDR1
QSVSSSY

SEQ ID NO: 9345 - protein, 7 aa, Homo sapiens
  Light chain CDR1
QSVSSSY

SEQ ID NO: 9346 - protein, 7 aa, Homo sapiens
  Light chain CDR1
QSVSSSY

SEQ ID NO: 9347 - protein, 7 aa, Homo sapiens
  Light chain CDR1
QSVSSSY

SEQ ID NO: 9348 - protein, 7 aa, Homo sapiens
  Light chain CDR1
QSVSSSY

SEQ ID NO: 9349 - protein, 5 aa, Homo sapiens
  Light chain CDR1
QSVSY

SEQ ID NO: 9350 - protein, 7 aa, Homo sapiens
  Light chain CDR1
QSVSSSY

SEQ ID NO: 9351 - protein, 7 aa, Homo sapiens
  Light chain CDR1
QSVSSSY

SEQ ID NO: 9352 - protein, 7 aa, Homo sapiens
  Light chain CDR1
QSVSSSY

SEQ ID NO: 9353 - protein, 11 aa, Homo sapiens
  Light chain CDR1
QSLLHSNGYNY

SEQ ID NO: 9354 - protein, 7 aa, Homo sapiens
  Light chain CDR1
QSVSSSY

SEQ ID NO: 9355 - protein, 7 aa, Homo sapiens
  Light chain CDR1
QSVSSSC

SEQ ID NO: 9356 - protein, 7 aa, Homo sapiens
  Light chain CDR1
QSVSSSY

SEQ ID NO: 9357 - protein, 7 aa, Homo sapiens
  Light chain CDR1
QSVSSSC

SEQ ID NO: 9358 - protein, 7 aa, Homo sapiens
  Light chain CDR1
QSVSSSY

SEQ ID NO: 9359 - protein, 7 aa, Homo sapiens
  Light chain CDR1
QSVSSSC

SEQ ID NO: 9360 - protein, 7 aa, Homo sapiens
  Light chain CDR1
QSVSSSC

SEQ ID NO: 9361 - protein, 7 aa, Homo sapiens
  Light chain CDR1
QSVSSSY

SEQ ID NO: 9362 - protein, 7 aa, Homo sapiens
  Light chain CDR1
QSVSSSC

SEQ ID NO: 9363 - protein, 7 aa, Homo sapiens
  Light chain CDR1
QSVSSSY

SEQ ID NO: 9364 - protein, 7 aa, Homo sapiens
  Light chain CDR1
QSVSSSC

SEQ ID NO: 9365 - protein, 7 aa, Homo sapiens
  Light chain CDR1
QSVSSSC

SEQ ID NO: 9366 - protein, 7 aa, Homo sapiens
  Light chain CDR1
QSVSSSY

SEQ ID NO: 9367 - protein, 7 aa, Homo sapiens
  Light chain CDR1
QSVSSSY

SEQ ID NO: 9368 - protein, 7 aa, Homo sapiens
  Light chain CDR1
QSVSSSY

SEQ ID NO: 9369 - protein, 7 aa, Homo sapiens
  Light chain CDR1
QSVSSSY

SEQ ID NO: 9370 - protein, 6 aa, Homo sapiens
  Light chain CDR1
QSIGSS

SEQ ID NO: 9371 - protein, 7 aa, Homo sapiens
  Light chain CDR1
QSVSSSY

SEQ ID NO: 9372 - protein, 6 aa, Homo sapiens
  Light chain CDR1
QAIRND

SEQ ID NO: 9373 - protein, 7 aa, Homo sapiens
  Light chain CDR1
QSVSSSY

SEQ ID NO: 9374 - protein, 7 aa, Homo sapiens
  Light chain CDR1
QSVSSSY

SEQ ID NO: 9375 - protein, 7 aa, Homo sapiens
  Light chain CDR1
QSVSSSY

SEQ ID NO: 9376 - protein, 7 aa, Homo sapiens
  Light chain CDR1
QSVSSSY

SEQ ID NO: 9377 - protein, 6 aa, Homo sapiens
  Light chain CDR1
QAIRND

SEQ ID NO: 9378 - protein, 7 aa, Homo sapiens
  Light chain CDR1
QSVSSSY

SEQ ID NO: 9379 - protein, 7 aa, Homo sapiens
  Light chain CDR1
QSVSSSY

SEQ ID NO: 9380 - protein, 7 aa, Homo sapiens
  Light chain CDR1
QSVSSNY

SEQ ID NO: 9381 - protein, 7 aa, Homo sapiens
  Light chain CDR1
QSVSSSY

SEQ ID NO: 9382 - protein, 7 aa, Homo sapiens
  Light chain CDR1
QSVSSSY

SEQ ID NO: 9383 - protein, 7 aa, Homo sapiens
  Light chain CDR1
QSVSSSY

SEQ ID NO: 9384 - protein, 6 aa, Homo sapiens
  Light chain CDR1
QSISSY

SEQ ID NO: 9385 - protein, 11 aa, Homo sapiens
  Light chain CDR1
QSLVYSDGNTY

SEQ ID NO: 9386 - protein, 7 aa, Homo sapiens
  Light chain CDR1
QSVSSSY

SEQ ID NO: 9387 - protein, 7 aa, Homo sapiens
  Light chain CDR1
QSVSSSY

SEQ ID NO: 9388 - protein, 11 aa, Homo sapiens
  Light chain CDR1
QSLLHSNGYNY

SEQ ID NO: 9389 - protein, 7 aa, Homo sapiens
  Light chain CDR1
QSVSSSY

SEQ ID NO: 9390 - protein, 6 aa, Homo sapiens
  Light chain CDR1
QSISSY

SEQ ID NO: 9391 - protein, 7 aa, Homo sapiens
  Light chain CDR1
QSVSSSY

SEQ ID NO: 9392 - protein, 6 aa, Homo sapiens
  Light chain CDR1
QGISNY

SEQ ID NO: 9393 - protein, 6 aa, Homo sapiens
  Light chain CDR1
QSISSY

SEQ ID NO: 9394 - protein, 7 aa, Homo sapiens
  Light chain CDR1
QSVSSNF

SEQ ID NO: 9395 - protein, 6 aa, Homo sapiens
  Light chain CDR1
QGISNY

SEQ ID NO: 9396 - protein, 6 aa, Homo sapiens
  Light chain CDR1
QSISSY

SEQ ID NO: 9397 - protein, 7 aa, Homo sapiens
  Light chain CDR1
QSVSSSY

SEQ ID NO: 9398 - protein, 6 aa, Homo sapiens
  Light chain CDR1
QSISSY

SEQ ID NO: 9399 - protein, 7 aa, Homo sapiens
  Light chain CDR1
QSVSSSY

SEQ ID NO: 9400 - protein, 7 aa, Homo sapiens
  Light chain CDR1
QSVSSSY

SEQ ID NO: 9401 - protein, 6 aa, Homo sapiens
  Light chain CDR1
QGISNY

SEQ ID NO: 9402 - protein, 7 aa, Homo sapiens
  Light chain CDR1
QSVSSSY

SEQ ID NO: 9403 - protein, 7 aa, Homo sapiens
  Light chain CDR1
QSVSSSY

SEQ ID NO: 9404 - protein, 7 aa, Homo sapiens
  Light chain CDR1
QSGSSSY

SEQ ID NO: 9405 - protein, 7 aa, Homo sapiens
  Light chain CDR1
QSGSSSY

SEQ ID NO: 9406 - protein, 7 aa, Homo sapiens
  Light chain CDR1
QSVSSSY

SEQ ID NO: 9407 - protein, 7 aa, Homo sapiens
  Light chain CDR1
QSVSSSY

SEQ ID NO: 9408 - protein, 6 aa, Homo sapiens
  Light chain CDR1
QGISSY

SEQ ID NO: 9409 - protein, 7 aa, Homo sapiens
  Light chain CDR1
QSVSSSY

SEQ ID NO: 9410 - protein, 6 aa, Homo sapiens
  Light chain CDR1
QSIGSS

SEQ ID NO: 9411 - protein, 6 aa, Homo sapiens
  Light chain CDR1
QSISSY

SEQ ID NO: 9412 - protein, 6 aa, Homo sapiens
  Light chain CDR1
QGISNY

SEQ ID NO: 9413 - protein, 7 aa, Homo sapiens
  Light chain CDR1
QSVSSSY

SEQ ID NO: 9414 - protein, 7 aa, Homo sapiens
  Light chain CDR1
QSVSSSY

SEQ ID NO: 9415 - protein, 6 aa, Homo sapiens
  Light chain CDR1
QGISNY

SEQ ID NO: 9416 - protein, 7 aa, Homo sapiens
  Light chain CDR1
QSFSSSY

SEQ ID NO: 9417 - protein, 7 aa, Homo sapiens
  Light chain CDR1
QSVSSSY

SEQ ID NO: 9418 - protein, 7 aa, Homo sapiens
  Light chain CDR1
QSVSSSY

SEQ ID NO: 9419 - protein, 7 aa, Homo sapiens
  Light chain CDR1
QSVSSSY

SEQ ID NO: 9420 - protein, 7 aa, Homo sapiens
  Light chain CDR1
QSVSSSY

SEQ ID NO: 9421 - protein, 7 aa, Homo sapiens
  Light chain CDR1
QSVSSSY

SEQ ID NO: 9422 - protein, 7 aa, Homo sapiens
  Light chain CDR1
QSVFSSY

SEQ ID NO: 9423 - protein, 6 aa, Homo sapiens
  Light chain CDR1
QSISSY

SEQ ID NO: 9424 - protein, 7 aa, Homo sapiens
  Light chain CDR1
QSVSSSY

SEQ ID NO: 9425 - protein, 7 aa, Homo sapiens
  Light chain CDR1
QSVSSSY

SEQ ID NO: 9426 - protein, 7 aa, Homo sapiens
  Light chain CDR1
QSVSSSY

SEQ ID NO: 9427 - protein, 7 aa, Homo sapiens
  Light chain CDR1
QSVSSSY

SEQ ID NO: 9428 - protein, 7 aa, Homo sapiens
  Light chain CDR1
QSVSSSY

SEQ ID NO: 9429 - protein, 7 aa, Homo sapiens
  Light chain CDR1
QSVSSSY

SEQ ID NO: 9430 - protein, 6 aa, Homo sapiens
  Light chain CDR1
QGISNY

SEQ ID NO: 9431 - protein, 7 aa, Homo sapiens
  Light chain CDR1
QSVSSSY

SEQ ID NO: 9432 - protein, 7 aa, Homo sapiens
  Light chain CDR1
QSVSSSY

SEQ ID NO: 9433 - protein, 7 aa, Homo sapiens
  Light chain CDR1
QSVSSSY

SEQ ID NO: 9434 - protein, 6 aa, Homo sapiens
  Light chain CDR1
QSVSSY

SEQ ID NO: 9435 - protein, 7 aa, Homo sapiens
  Light chain CDR1
QSVSSSY

SEQ ID NO: 9436 - protein, 7 aa, Homo sapiens
  Light chain CDR1
QSVSSSY

SEQ ID NO: 9437 - protein, 7 aa, Homo sapiens
  Light chain CDR1
QSVSSSY

SEQ ID NO: 9438 - protein, 7 aa, Homo sapiens
  Light chain CDR1
QSVSSSY

SEQ ID NO: 9439 - protein, 7 aa, Homo sapiens
  Light chain CDR1
QSVSSSY

SEQ ID NO: 9440 - protein, 7 aa, Homo sapiens
  Light chain CDR1
QSGSSSY

SEQ ID NO: 9441 - protein, 5 aa, Homo sapiens
  Light chain CDR1
QSVSY

SEQ ID NO: 9442 - protein, 7 aa, Homo sapiens
  Light chain CDR1
QSVSSSY

SEQ ID NO: 9443 - protein, 7 aa, Homo sapiens
  Light chain CDR1
QSVSSSY

SEQ ID NO: 9444 - protein, 5 aa, Homo sapiens
  Light chain CDR1
QSVSY

SEQ ID NO: 9445 - protein, 7 aa, Homo sapiens
  Light chain CDR1
QSVSSSY

SEQ ID NO: 9446 - protein, 6 aa, Homo sapiens
  Light chain CDR1
QGISNY

SEQ ID NO: 9447 - protein, 7 aa, Homo sapiens
  Light chain CDR1
QSVSSSY

SEQ ID NO: 9448 - protein, 7 aa, Homo sapiens
  Light chain CDR1
QSVSSSY

SEQ ID NO: 9449 - protein, 11 aa, Homo sapiens
  Light chain CDR1
QSLLHSNGYNY

SEQ ID NO: 9450 - protein, 7 aa, Homo sapiens
  Light chain CDR1
QSVSSSY

SEQ ID NO: 9451 - protein, 7 aa, Homo sapiens
  Light chain CDR1
QSVSSSY

SEQ ID NO: 9452 - protein, 7 aa, Homo sapiens
  Light chain CDR1
QSVSSSY

SEQ ID NO: 9453 - protein, 7 aa, Homo sapiens
  Light chain CDR1
QSVSSSY

SEQ ID NO: 9454 - protein, 6 aa, Homo sapiens
  Light chain CDR1
QGISNY

SEQ ID NO: 9455 - protein, 7 aa, Homo sapiens
  Light chain CDR1
QSVSSSY

SEQ ID NO: 9456 - protein, 5 aa, Homo sapiens
  Light chain CDR1
QSVSY

SEQ ID NO: 9457 - protein, 5 aa, Homo sapiens
  Light chain CDR1
QSVSY

SEQ ID NO: 9458 - protein, 5 aa, Homo sapiens
  Light chain CDR1
QSVSY

SEQ ID NO: 9459 - protein, 5 aa, Homo sapiens
  Light chain CDR1
QSVSY

SEQ ID NO: 9460 - protein, 7 aa, Homo sapiens
  Light chain CDR1
QSVSSSY

SEQ ID NO: 9461 - protein, 7 aa, Homo sapiens
  Light chain CDR1
QSVSSSY

SEQ ID NO: 9462 - protein, 5 aa, Homo sapiens
  Light chain CDR1
QSVSY

SEQ ID NO: 9463 - protein, 5 aa, Homo sapiens
  Light chain CDR1
QSVSY

SEQ ID NO: 9464 - protein, 7 aa, Homo sapiens
  Light chain CDR1
QSVSSSY

SEQ ID NO: 9465 - protein, 6 aa, Homo sapiens
  Light chain CDR1
QSVSSY

SEQ ID NO: 9466 - protein, 5 aa, Homo sapiens
  Light chain CDR1
QSVSY

SEQ ID NO: 9467 - protein, 7 aa, Homo sapiens
  Light chain CDR1
QSVSSSY

SEQ ID NO: 9468 - protein, 5 aa, Homo sapiens
  Light chain CDR1
QSVSY

SEQ ID NO: 9469 - protein, 6 aa, Homo sapiens
  Light chain CDR1
QRISSY

SEQ ID NO: 9470 - protein, 5 aa, Homo sapiens
  Light chain CDR1
QSVSY

SEQ ID NO: 9471 - protein, 7 aa, Homo sapiens
  Light chain CDR1
QSVSSSY

SEQ ID NO: 9472 - protein, 7 aa, Homo sapiens
  Light chain CDR1
QSVSSSY

SEQ ID NO: 9473 - protein, 7 aa, Homo sapiens
  Light chain CDR1
QSVNNRY

SEQ ID NO: 9474 - protein, 5 aa, Homo sapiens
  Light chain CDR1
QSVSY

SEQ ID NO: 9475 - protein, 5 aa, Homo sapiens
  Light chain CDR1
QSVSY

SEQ ID NO: 9476 - protein, 7 aa, Homo sapiens
  Light chain CDR1
QSVSSSY

SEQ ID NO: 9477 - protein, 7 aa, Homo sapiens
  Light chain CDR1
QSVSSSY

SEQ ID NO: 9478 - protein, 7 aa, Homo sapiens
  Light chain CDR1
QSVSSSY

SEQ ID NO: 9479 - protein, 7 aa, Homo sapiens
  Light chain CDR1
QSVSSSY

SEQ ID NO: 9480 - protein, 7 aa, Homo sapiens
  Light chain CDR1
QSVSSSY

SEQ ID NO: 9481 - protein, 7 aa, Homo sapiens
  Light chain CDR1
QSVSSSY

SEQ ID NO: 9482 - protein, 5 aa, Homo sapiens
  Light chain CDR1
QSVSY

SEQ ID NO: 9483 - protein, 7 aa, Homo sapiens
  Light chain CDR1
QSVSSSY

SEQ ID NO: 9484 - protein, 7 aa, Homo sapiens
  Light chain CDR1
QSVGSNY

SEQ ID NO: 9485 - protein, 7 aa, Homo sapiens
  Light chain CDR1
QSVSSSY

SEQ ID NO: 9486 - protein, 7 aa, Homo sapiens
  Light chain CDR1
QSVSSSY

SEQ ID NO: 9487 - protein, 7 aa, Homo sapiens
  Light chain CDR1
QSVSSSY

SEQ ID NO: 9488 - protein, 3 aa, Homo sapiens
  Light chain CDR2
ASS

SEQ ID NO: 9489 - protein, 3 aa, Homo sapiens
  Light chain CDR2
AAS

SEQ ID NO: 9490 - protein, 3 aa, Homo sapiens
  Light chain CDR2
GAS

SEQ ID NO: 9491 - protein, 3 aa, Homo sapiens
  Light chain CDR2
AAS

SEQ ID NO: 9492 - protein, 3 aa, Homo sapiens
  Light chain CDR2
AAS

SEQ ID NO: 9493 - protein, 3 aa, Homo sapiens
  Light chain CDR2
AAS

SEQ ID NO: 9494 - protein, 3 aa, Homo sapiens
  Light chain CDR2
AAS

SEQ ID NO: 9495 - protein, 3 aa, Homo sapiens
  Light chain CDR2
GAS

SEQ ID NO: 9496 - protein, 3 aa, Homo sapiens
  Light chain CDR2
AAS

SEQ ID NO: 9497 - protein, 3 aa, Homo sapiens
  Light chain CDR2
AAS

SEQ ID NO: 9498 - protein, 3 aa, Homo sapiens
  Light chain CDR2
AAS

SEQ ID NO: 9499 - protein, 3 aa, Homo sapiens
  Light chain CDR2
AAS

SEQ ID NO: 9500 - protein, 3 aa, Homo sapiens
  Light chain CDR2
GTS

SEQ ID NO: 9501 - protein, 3 aa, Homo sapiens
  Light chain CDR2
GAS

SEQ ID NO: 9502 - protein, 3 aa, Homo sapiens
  Light chain CDR2
AAS

SEQ ID NO: 9503 - protein, 3 aa, Homo sapiens
  Light chain CDR2
AAS

SEQ ID NO: 9504 - protein, 3 aa, Homo sapiens
  Light chain CDR2
AAS

SEQ ID NO: 9505 - protein, 3 aa, Homo sapiens
  Light chain CDR2
AAS

SEQ ID NO: 9506 - protein, 3 aa, Homo sapiens
  Light chain CDR2
TAS

SEQ ID NO: 9507 - protein, 3 aa, Homo sapiens
  Light chain CDR2
ASS

SEQ ID NO: 9508 - protein, 3 aa, Homo sapiens
  Light chain CDR2
ASS

SEQ ID NO: 9509 - protein, 3 aa, Homo sapiens
  Light chain CDR2
AAS

SEQ ID NO: 9510 - protein, 3 aa, Homo sapiens
  Light chain CDR2
AAS

SEQ ID NO: 9511 - protein, 3 aa, Homo sapiens
  Light chain CDR2
ASS

SEQ ID NO: 9512 - protein, 3 aa, Homo sapiens
  Light chain CDR2
AAS

SEQ ID NO: 9513 - protein, 3 aa, Homo sapiens
  Light chain CDR2
ASS

SEQ ID NO: 9514 - protein, 3 aa, Homo sapiens
  Light chain CDR2
AAS

SEQ ID NO: 9515 - protein, 3 aa, Homo sapiens
  Light chain CDR2
AAS

SEQ ID NO: 9516 - protein, 3 aa, Homo sapiens
  Light chain CDR2
GAS

SEQ ID NO: 9517 - protein, 3 aa, Homo sapiens
  Light chain CDR2
ASS

SEQ ID NO: 9518 - protein, 3 aa, Homo sapiens
  Light chain CDR2
AAS

SEQ ID NO: 9519 - protein, 3 aa, Homo sapiens
  Light chain CDR2
GAS

SEQ ID NO: 9520 - protein, 3 aa, Homo sapiens
  Light chain CDR2
ASS

SEQ ID NO: 9521 - protein, 3 aa, Homo sapiens
  Light chain CDR2
ASS

SEQ ID NO: 9522 - protein, 3 aa, Homo sapiens
  Light chain CDR2
AAS

SEQ ID NO: 9523 - protein, 3 aa, Homo sapiens
  Light chain CDR2
AAS

SEQ ID NO: 9524 - protein, 3 aa, Homo sapiens
  Light chain CDR2
ASS

SEQ ID NO: 9525 - protein, 3 aa, Homo sapiens
  Light chain CDR2
ASS

SEQ ID NO: 9526 - protein, 3 aa, Homo sapiens
  Light chain CDR2
GAS

SEQ ID NO: 9527 - protein, 3 aa, Homo sapiens
  Light chain CDR2
AAS

SEQ ID NO: 9528 - protein, 3 aa, Homo sapiens
  Light chain CDR2
GAS

SEQ ID NO: 9529 - protein, 3 aa, Homo sapiens
  Light chain CDR2
AAS

SEQ ID NO: 9530 - protein, 3 aa, Homo sapiens
  Light chain CDR2
ASS

SEQ ID NO: 9531 - protein, 3 aa, Homo sapiens
  Light chain CDR2
GAS

SEQ ID NO: 9532 - protein, 3 aa, Homo sapiens
  Light chain CDR2
AAS

SEQ ID NO: 9533 - protein, 3 aa, Homo sapiens
  Light chain CDR2
AAS

SEQ ID NO: 9534 - protein, 3 aa, Homo sapiens
  Light chain CDR2
AAS

SEQ ID NO: 9535 - protein, 3 aa, Homo sapiens
  Light chain CDR2
AAS

SEQ ID NO: 9536 - protein, 3 aa, Homo sapiens
  Light chain CDR2
GAS

SEQ ID NO: 9537 - protein, 3 aa, Homo sapiens
  Light chain CDR2
GAS

SEQ ID NO: 9538 - protein, 3 aa, Homo sapiens
  Light chain CDR2
DAS

SEQ ID NO: 9539 - protein, 3 aa, Homo sapiens
  Light chain CDR2
GAS

SEQ ID NO: 9540 - protein, 3 aa, Homo sapiens
  Light chain CDR2
GAS

SEQ ID NO: 9541 - protein, 3 aa, Homo sapiens
  Light chain CDR2
LGS

SEQ ID NO: 9542 - protein, 3 aa, Homo sapiens
  Light chain CDR2
AAS

SEQ ID NO: 9543 - protein, 3 aa, Homo sapiens
  Light chain CDR2
GAS

SEQ ID NO: 9544 - protein, 3 aa, Homo sapiens
  Light chain CDR2
GAS

SEQ ID NO: 9545 - protein, 3 aa, Homo sapiens
  Light chain CDR2
GAS

SEQ ID NO: 9546 - protein, 3 aa, Homo sapiens
  Light chain CDR2
AAS

SEQ ID NO: 9547 - protein, 3 aa, Homo sapiens
  Light chain CDR2
GAS

SEQ ID NO: 9548 - protein, 3 aa, Homo sapiens
  Light chain CDR2
AAS

SEQ ID NO: 9549 - protein, 3 aa, Homo sapiens
  Light chain CDR2
GAS

SEQ ID NO: 9550 - protein, 3 aa, Homo sapiens
  Light chain CDR2
GAS

SEQ ID NO: 9551 - protein, 3 aa, Homo sapiens
  Light chain CDR2
GAS

SEQ ID NO: 9552 - protein, 3 aa, Homo sapiens
  Light chain CDR2
GAS

SEQ ID NO: 9553 - protein, 3 aa, Homo sapiens
  Light chain CDR2
LGS

SEQ ID NO: 9554 - protein, 3 aa, Homo sapiens
  Light chain CDR2
GAS

SEQ ID NO: 9555 - protein, 3 aa, Homo sapiens
  Light chain CDR2
AAS

SEQ ID NO: 9556 - protein, 3 aa, Homo sapiens
  Light chain CDR2
AAS

SEQ ID NO: 9557 - protein, 3 aa, Homo sapiens
  Light chain CDR2
AAS

SEQ ID NO: 9558 - protein, 3 aa, Homo sapiens
  Light chain CDR2
GAS

SEQ ID NO: 9559 - protein, 3 aa, Homo sapiens
  Light chain CDR2
AAS

SEQ ID NO: 9560 - protein, 3 aa, Homo sapiens
  Light chain CDR2
AAS

SEQ ID NO: 9561 - protein, 3 aa, Homo sapiens
  Light chain CDR2
GAS

SEQ ID NO: 9562 - protein, 3 aa, Homo sapiens
  Light chain CDR2
AAS

SEQ ID NO: 9563 - protein, 3 aa, Homo sapiens
  Light chain CDR2
GAS

SEQ ID NO: 9564 - protein, 3 aa, Homo sapiens
  Light chain CDR2
AAS

SEQ ID NO: 9565 - protein, 3 aa, Homo sapiens
  Light chain CDR2
GAS

SEQ ID NO: 9566 - protein, 3 aa, Homo sapiens
  Light chain CDR2
GAS

SEQ ID NO: 9567 - protein, 3 aa, Homo sapiens
  Light chain CDR2
AAS

SEQ ID NO: 9568 - protein, 3 aa, Homo sapiens
  Light chain CDR2
AAS

SEQ ID NO: 9569 - protein, 3 aa, Homo sapiens
  Light chain CDR2
GAS

SEQ ID NO: 9570 - protein, 3 aa, Homo sapiens
  Light chain CDR2
AAS

SEQ ID NO: 9571 - protein, 3 aa, Homo sapiens
  Light chain CDR2
LGS

SEQ ID NO: 9572 - protein, 3 aa, Homo sapiens
  Light chain CDR2
GAS

SEQ ID NO: 9573 - protein, 3 aa, Homo sapiens
  Light chain CDR2
GAS

SEQ ID NO: 9574 - protein, 3 aa, Homo sapiens
  Light chain CDR2
GAS

SEQ ID NO: 9575 - protein, 3 aa, Homo sapiens
  Light chain CDR2
AAS

SEQ ID NO: 9576 - protein, 3 aa, Homo sapiens
  Light chain CDR2
AAS

SEQ ID NO: 9577 - protein, 3 aa, Homo sapiens
  Light chain CDR2
LGS

SEQ ID NO: 9578 - protein, 3 aa, Homo sapiens
  Light chain CDR2
GAS

SEQ ID NO: 9579 - protein, 3 aa, Homo sapiens
  Light chain CDR2
AAS

SEQ ID NO: 9580 - protein, 3 aa, Homo sapiens
  Light chain CDR2
AAS

SEQ ID NO: 9581 - protein, 3 aa, Homo sapiens
  Light chain CDR2
GAS

SEQ ID NO: 9582 - protein, 3 aa, Homo sapiens
  Light chain CDR2
AAS

SEQ ID NO: 9583 - protein, 3 aa, Homo sapiens
  Light chain CDR2
AAS

SEQ ID NO: 9584 - protein, 3 aa, Homo sapiens
  Light chain CDR2
AAS

SEQ ID NO: 9585 - protein, 3 aa, Homo sapiens
  Light chain CDR2
AAS

SEQ ID NO: 9586 - protein, 3 aa, Homo sapiens
  Light chain CDR2
AAS

SEQ ID NO: 9587 - protein, 3 aa, Homo sapiens
  Light chain CDR2
LGS

SEQ ID NO: 9588 - protein, 3 aa, Homo sapiens
  Light chain CDR2
AAS

SEQ ID NO: 9589 - protein, 3 aa, Homo sapiens
  Light chain CDR2
AAS

SEQ ID NO: 9590 - protein, 3 aa, Homo sapiens
  Light chain CDR2
AAS

SEQ ID NO: 9591 - protein, 3 aa, Homo sapiens
  Light chain CDR2
GAS

SEQ ID NO: 9592 - protein, 3 aa, Homo sapiens
  Light chain CDR2
AAS

SEQ ID NO: 9593 - protein, 3 aa, Homo sapiens
  Light chain CDR2
AAS

SEQ ID NO: 9594 - protein, 3 aa, Homo sapiens
  Light chain CDR2
AAS

SEQ ID NO: 9595 - protein, 3 aa, Homo sapiens
  Light chain CDR2
AAS

SEQ ID NO: 9596 - protein, 3 aa, Homo sapiens
  Light chain CDR2
AAS

SEQ ID NO: 9597 - protein, 3 aa, Homo sapiens
  Light chain CDR2
AAS

SEQ ID NO: 9598 - protein, 3 aa, Homo sapiens
  Light chain CDR2
AAS

SEQ ID NO: 9599 - protein, 3 aa, Homo sapiens
  Light chain CDR2
GAS

SEQ ID NO: 9600 - protein, 3 aa, Homo sapiens
  Light chain CDR2
AAS

SEQ ID NO: 9601 - protein, 3 aa, Homo sapiens
  Light chain CDR2
AAS

SEQ ID NO: 9602 - protein, 3 aa, Homo sapiens
  Light chain CDR2
AAS

SEQ ID NO: 9603 - protein, 3 aa, Homo sapiens
  Light chain CDR2
AAS

SEQ ID NO: 9604 - protein, 3 aa, Homo sapiens
  Light chain CDR2
AAS

SEQ ID NO: 9605 - protein, 3 aa, Homo sapiens
  Light chain CDR2
AAS

SEQ ID NO: 9606 - protein, 3 aa, Homo sapiens
  Light chain CDR2
AAS

SEQ ID NO: 9607 - protein, 3 aa, Homo sapiens
  Light chain CDR2
GAS

SEQ ID NO: 9608 - protein, 3 aa, Homo sapiens
  Light chain CDR2
AAS

SEQ ID NO: 9609 - protein, 3 aa, Homo sapiens
  Light chain CDR2
GAS

SEQ ID NO: 9610 - protein, 3 aa, Homo sapiens
  Light chain CDR2
AAS

SEQ ID NO: 9611 - protein, 3 aa, Homo sapiens
  Light chain CDR2
AAS

SEQ ID NO: 9612 - protein, 3 aa, Homo sapiens
  Light chain CDR2
AAS

SEQ ID NO: 9613 - protein, 3 aa, Homo sapiens
  Light chain CDR2
AAS

SEQ ID NO: 9614 - protein, 3 aa, Homo sapiens
  Light chain CDR2
AAS

SEQ ID NO: 9615 - protein, 3 aa, Homo sapiens
  Light chain CDR2
GAS

SEQ ID NO: 9616 - protein, 3 aa, Homo sapiens
  Light chain CDR2
AAS

SEQ ID NO: 9617 - protein, 3 aa, Homo sapiens
  Light chain CDR2
LGS

SEQ ID NO: 9618 - protein, 3 aa, Homo sapiens
  Light chain CDR2
AAS

SEQ ID NO: 9619 - protein, 3 aa, Homo sapiens
  Light chain CDR2
GAS

SEQ ID NO: 9620 - protein, 3 aa, Homo sapiens
  Light chain CDR2
GAS

SEQ ID NO: 9621 - protein, 3 aa, Homo sapiens
  Light chain CDR2
DAS

SEQ ID NO: 9622 - protein, 3 aa, Homo sapiens
  Light chain CDR2
GAS

SEQ ID NO: 9623 - protein, 3 aa, Homo sapiens
  Light chain CDR2
DAS

SEQ ID NO: 9624 - protein, 3 aa, Homo sapiens
  Light chain CDR2
GAS

SEQ ID NO: 9625 - protein, 3 aa, Homo sapiens
  Light chain CDR2
GAS

SEQ ID NO: 9626 - protein, 3 aa, Homo sapiens
  Light chain CDR2
GAS

SEQ ID NO: 9627 - protein, 3 aa, Homo sapiens
  Light chain CDR2
GAS

SEQ ID NO: 9628 - protein, 3 aa, Homo sapiens
  Light chain CDR2
RAS

SEQ ID NO: 9629 - protein, 3 aa, Homo sapiens
  Light chain CDR2
AAS

SEQ ID NO: 9630 - protein, 3 aa, Homo sapiens
  Light chain CDR2
GAS

SEQ ID NO: 9631 - protein, 3 aa, Homo sapiens
  Light chain CDR2
RSS

SEQ ID NO: 9632 - protein, 3 aa, Homo sapiens
  Light chain CDR2
GAS

SEQ ID NO: 9633 - protein, 3 aa, Homo sapiens
  Light chain CDR2
GAS

SEQ ID NO: 9634 - protein, 3 aa, Homo sapiens
  Light chain CDR2
GAS

SEQ ID NO: 9635 - protein, 3 aa, Homo sapiens
  Light chain CDR2
GAS

SEQ ID NO: 9636 - protein, 3 aa, Homo sapiens
  Light chain CDR2
YAS

SEQ ID NO: 9637 - protein, 3 aa, Homo sapiens
  Light chain CDR2
GAS

SEQ ID NO: 9638 - protein, 3 aa, Homo sapiens
  Light chain CDR2
YAS

SEQ ID NO: 9639 - protein, 3 aa, Homo sapiens
  Light chain CDR2
GAS

SEQ ID NO: 9640 - protein, 3 aa, Homo sapiens
  Light chain CDR2
GAS

SEQ ID NO: 9641 - protein, 3 aa, Homo sapiens
  Light chain CDR2
DAS

SEQ ID NO: 9642 - protein, 3 aa, Homo sapiens
  Light chain CDR2
DAS

SEQ ID NO: 9643 - protein, 3 aa, Homo sapiens
  Light chain CDR2
AAS

SEQ ID NO: 9644 - protein, 3 aa, Homo sapiens
  Light chain CDR2
AAS

SEQ ID NO: 9645 - protein, 3 aa, Homo sapiens
  Light chain CDR2
GAS

SEQ ID NO: 9646 - protein, 3 aa, Homo sapiens
  Light chain CDR2
AAS

SEQ ID NO: 9647 - protein, 3 aa, Homo sapiens
  Light chain CDR2
DAS

SEQ ID NO: 9648 - protein, 3 aa, Homo sapiens
  Light chain CDR2
AAS

SEQ ID NO: 9649 - protein, 3 aa, Homo sapiens
  Light chain CDR2
GAS

SEQ ID NO: 9650 - protein, 3 aa, Homo sapiens
  Light chain CDR2
AAS

SEQ ID NO: 9651 - protein, 3 aa, Homo sapiens
  Light chain CDR2
GAS

SEQ ID NO: 9652 - protein, 3 aa, Homo sapiens
  Light chain CDR2
GAS

SEQ ID NO: 9653 - protein, 3 aa, Homo sapiens
  Light chain CDR2
GAS

SEQ ID NO: 9654 - protein, 3 aa, Homo sapiens
  Light chain CDR2
GAS

SEQ ID NO: 9655 - protein, 3 aa, Homo sapiens
  Light chain CDR2
GAS

SEQ ID NO: 9656 - protein, 3 aa, Homo sapiens
  Light chain CDR2
DAS

SEQ ID NO: 9657 - protein, 3 aa, Homo sapiens
  Light chain CDR2
GAS

SEQ ID NO: 9658 - protein, 3 aa, Homo sapiens
  Light chain CDR2
GAS

SEQ ID NO: 9659 - protein, 3 aa, Homo sapiens
  Light chain CDR2
GAS

SEQ ID NO: 9660 - protein, 3 aa, Homo sapiens
  Light chain CDR2
GAS

SEQ ID NO: 9661 - protein, 3 aa, Homo sapiens
  Light chain CDR2
GAS

SEQ ID NO: 9662 - protein, 3 aa, Homo sapiens
  Light chain CDR2
GAS

SEQ ID NO: 9663 - protein, 3 aa, Homo sapiens
  Light chain CDR2
GAS

SEQ ID NO: 9664 - protein, 3 aa, Homo sapiens
  Light chain CDR2
GAS

SEQ ID NO: 9665 - protein, 3 aa, Homo sapiens
  Light chain CDR2
GAS

SEQ ID NO: 9666 - protein, 3 aa, Homo sapiens
  Light chain CDR2
GAS

SEQ ID NO: 9667 - protein, 3 aa, Homo sapiens
  Light chain CDR2
GAS

SEQ ID NO: 9668 - protein, 3 aa, Homo sapiens
  Light chain CDR2
DAS

SEQ ID NO: 9669 - protein, 3 aa, Homo sapiens
  Light chain CDR2
GAS

SEQ ID NO: 9670 - protein, 3 aa, Homo sapiens
  Light chain CDR2
GAS

SEQ ID NO: 9671 - protein, 3 aa, Homo sapiens
  Light chain CDR2
YAS

SEQ ID NO: 9672 - protein, 3 aa, Homo sapiens
  Light chain CDR2
AAS

SEQ ID NO: 9673 - protein, 3 aa, Homo sapiens
  Light chain CDR2
RAS

SEQ ID NO: 9674 - protein, 3 aa, Homo sapiens
  Light chain CDR2
RAS

SEQ ID NO: 9675 - protein, 3 aa, Homo sapiens
  Light chain CDR2
GAS

SEQ ID NO: 9676 - protein, 3 aa, Homo sapiens
  Light chain CDR2
GAS

SEQ ID NO: 9677 - protein, 3 aa, Homo sapiens
  Light chain CDR2
GAS

SEQ ID NO: 9678 - protein, 3 aa, Homo sapiens
  Light chain CDR2
AAS

SEQ ID NO: 9679 - protein, 3 aa, Homo sapiens
  Light chain CDR2
RSS

SEQ ID NO: 9680 - protein, 3 aa, Homo sapiens
  Light chain CDR2
DAS

SEQ ID NO: 9681 - protein, 3 aa, Homo sapiens
  Light chain CDR2
GAS

SEQ ID NO: 9682 - protein, 3 aa, Homo sapiens
  Light chain CDR2
RAS

SEQ ID NO: 9683 - protein, 3 aa, Homo sapiens
  Light chain CDR2
AAS

SEQ ID NO: 9684 - protein, 3 aa, Homo sapiens
  Light chain CDR2
GAS

SEQ ID NO: 9685 - protein, 3 aa, Homo sapiens
  Light chain CDR2
GAS

SEQ ID NO: 9686 - protein, 3 aa, Homo sapiens
  Light chain CDR2
DAS

SEQ ID NO: 9687 - protein, 3 aa, Homo sapiens
  Light chain CDR2
GAS

SEQ ID NO: 9688 - protein, 3 aa, Homo sapiens
  Light chain CDR2
GAS

SEQ ID NO: 9689 - protein, 3 aa, Homo sapiens
  Light chain CDR2
GAS

SEQ ID NO: 9690 - protein, 3 aa, Homo sapiens
  Light chain CDR2
ETS

SEQ ID NO: 9691 - protein, 3 aa, Homo sapiens
  Light chain CDR2
GAS

SEQ ID NO: 9692 - protein, 3 aa, Homo sapiens
  Light chain CDR2
RAS

SEQ ID NO: 9693 - protein, 3 aa, Homo sapiens
  Light chain CDR2
GAS

SEQ ID NO: 9694 - protein, 3 aa, Homo sapiens
  Light chain CDR2
GAS

SEQ ID NO: 9695 - protein, 3 aa, Homo sapiens
  Light chain CDR2
GAS

SEQ ID NO: 9696 - protein, 3 aa, Homo sapiens
  Light chain CDR2
GAS

SEQ ID NO: 9697 - protein, 3 aa, Homo sapiens
  Light chain CDR2
DAS

SEQ ID NO: 9698 - protein, 3 aa, Homo sapiens
  Light chain CDR2
GAS

SEQ ID NO: 9699 - protein, 3 aa, Homo sapiens
  Light chain CDR2
GAS

SEQ ID NO: 9700 - protein, 3 aa, Homo sapiens
  Light chain CDR2
GAS

SEQ ID NO: 9701 - protein, 3 aa, Homo sapiens
  Light chain CDR2
DAS

SEQ ID NO: 9702 - protein, 3 aa, Homo sapiens
  Light chain CDR2
DAS

SEQ ID NO: 9703 - protein, 3 aa, Homo sapiens
  Light chain CDR2
RAS

SEQ ID NO: 9704 - protein, 3 aa, Homo sapiens
  Light chain CDR2
GAS

SEQ ID NO: 9705 - protein, 3 aa, Homo sapiens
  Light chain CDR2
AAS

SEQ ID NO: 9706 - protein, 3 aa, Homo sapiens
  Light chain CDR2
GAS

SEQ ID NO: 9707 - protein, 3 aa, Homo sapiens
  Light chain CDR2
GAS

SEQ ID NO: 9708 - protein, 3 aa, Homo sapiens
  Light chain CDR2
GAS

SEQ ID NO: 9709 - protein, 3 aa, Homo sapiens
  Light chain CDR2
GAS

SEQ ID NO: 9710 - protein, 3 aa, Homo sapiens
  Light chain CDR2
GAS

SEQ ID NO: 9711 - protein, 3 aa, Homo sapiens
  Light chain CDR2
AAS

SEQ ID NO: 9712 - protein, 3 aa, Homo sapiens
  Light chain CDR2
GAS

SEQ ID NO: 9713 - protein, 3 aa, Homo sapiens
  Light chain CDR2
GAS

SEQ ID NO: 9714 - protein, 3 aa, Homo sapiens
  Light chain CDR2
DAS

SEQ ID NO: 9715 - protein, 3 aa, Homo sapiens
  Light chain CDR2
GAS

SEQ ID NO: 9716 - protein, 3 aa, Homo sapiens
  Light chain CDR2
DAS

SEQ ID NO: 9717 - protein, 3 aa, Homo sapiens
  Light chain CDR2
DAS

SEQ ID NO: 9718 - protein, 3 aa, Homo sapiens
  Light chain CDR2
ETS

SEQ ID NO: 9719 - protein, 3 aa, Homo sapiens
  Light chain CDR2
AAS

SEQ ID NO: 9720 - protein, 3 aa, Homo sapiens
  Light chain CDR2
DAS

SEQ ID NO: 9721 - protein, 3 aa, Homo sapiens
  Light chain CDR2
GAS

SEQ ID NO: 9722 - protein, 3 aa, Homo sapiens
  Light chain CDR2
DAS

SEQ ID NO: 9723 - protein, 3 aa, Homo sapiens
  Light chain CDR2
GAS

SEQ ID NO: 9724 - protein, 3 aa, Homo sapiens
  Light chain CDR2
GAS

SEQ ID NO: 9725 - protein, 3 aa, Homo sapiens
  Light chain CDR2
DAS

SEQ ID NO: 9726 - protein, 3 aa, Homo sapiens
  Light chain CDR2
GAS

SEQ ID NO: 9727 - protein, 3 aa, Homo sapiens
  Light chain CDR2
GAS

SEQ ID NO: 9728 - protein, 3 aa, Homo sapiens
  Light chain CDR2
GAS

SEQ ID NO: 9729 - protein, 3 aa, Homo sapiens
  Light chain CDR2
GAS

SEQ ID NO: 9730 - protein, 3 aa, Homo sapiens
  Light chain CDR2
GAS

SEQ ID NO: 9731 - protein, 3 aa, Homo sapiens
  Light chain CDR2
GAS

SEQ ID NO: 9732 - protein, 3 aa, Homo sapiens
  Light chain CDR2
GAS

SEQ ID NO: 9733 - protein, 3 aa, Homo sapiens
  Light chain CDR2
LGS

SEQ ID NO: 9734 - protein, 3 aa, Homo sapiens
  Light chain CDR2
GAS

SEQ ID NO: 9735 - protein, 3 aa, Homo sapiens
  Light chain CDR2
AAS

SEQ ID NO: 9736 - protein, 3 aa, Homo sapiens
  Light chain CDR2
LGS

SEQ ID NO: 9737 - protein, 3 aa, Homo sapiens
  Light chain CDR2
YAS

SEQ ID NO: 9738 - protein, 3 aa, Homo sapiens
  Light chain CDR2
GAS

SEQ ID NO: 9739 - protein, 3 aa, Homo sapiens
  Light chain CDR2
AAS

SEQ ID NO: 9740 - protein, 3 aa, Homo sapiens
  Light chain CDR2
GAS

SEQ ID NO: 9741 - protein, 3 aa, Homo sapiens
  Light chain CDR2
GAS

SEQ ID NO: 9742 - protein, 3 aa, Homo sapiens
  Light chain CDR2
GAS

SEQ ID NO: 9743 - protein, 3 aa, Homo sapiens
  Light chain CDR2
GAS

SEQ ID NO: 9744 - protein, 3 aa, Homo sapiens
  Light chain CDR2
GAS

SEQ ID NO: 9745 - protein, 3 aa, Homo sapiens
  Light chain CDR2
GAS

SEQ ID NO: 9746 - protein, 3 aa, Homo sapiens
  Light chain CDR2
GAS

SEQ ID NO: 9747 - protein, 3 aa, Homo sapiens
  Light chain CDR2
GAS

SEQ ID NO: 9748 - protein, 3 aa, Homo sapiens
  Light chain CDR2
GAS

SEQ ID NO: 9749 - protein, 3 aa, Homo sapiens
  Light chain CDR2
GAS

SEQ ID NO: 9750 - protein, 3 aa, Homo sapiens
  Light chain CDR2
GAS

SEQ ID NO: 9751 - protein, 3 aa, Homo sapiens
  Light chain CDR2
GAS

SEQ ID NO: 9752 - protein, 3 aa, Homo sapiens
  Light chain CDR2
GAS

SEQ ID NO: 9753 - protein, 3 aa, Homo sapiens
  Light chain CDR2
GAS

SEQ ID NO: 9754 - protein, 3 aa, Homo sapiens
  Light chain CDR2
GAS

SEQ ID NO: 9755 - protein, 3 aa, Homo sapiens
  Light chain CDR2
GAS

SEQ ID NO: 9756 - protein, 3 aa, Homo sapiens
  Light chain CDR2
GAS

SEQ ID NO: 9757 - protein, 3 aa, Homo sapiens
  Light chain CDR2
GAS

SEQ ID NO: 9758 - protein, 3 aa, Homo sapiens
  Light chain CDR2
GAS

SEQ ID NO: 9759 - protein, 3 aa, Homo sapiens
  Light chain CDR2
GAS

SEQ ID NO: 9760 - protein, 3 aa, Homo sapiens
  Light chain CDR2
LGS

SEQ ID NO: 9761 - protein, 3 aa, Homo sapiens
  Light chain CDR2
GAS

SEQ ID NO: 9762 - protein, 3 aa, Homo sapiens
  Light chain CDR2
GAS

SEQ ID NO: 9763 - protein, 3 aa, Homo sapiens
  Light chain CDR2
GAS

SEQ ID NO: 9764 - protein, 3 aa, Homo sapiens
  Light chain CDR2
GAS

SEQ ID NO: 9765 - protein, 3 aa, Homo sapiens
  Light chain CDR2
GAS

SEQ ID NO: 9766 - protein, 3 aa, Homo sapiens
  Light chain CDR2
GAS

SEQ ID NO: 9767 - protein, 3 aa, Homo sapiens
  Light chain CDR2
GAS

SEQ ID NO: 9768 - protein, 3 aa, Homo sapiens
  Light chain CDR2
GAS

SEQ ID NO: 9769 - protein, 3 aa, Homo sapiens
  Light chain CDR2
GAS

SEQ ID NO: 9770 - protein, 3 aa, Homo sapiens
  Light chain CDR2
GAS

SEQ ID NO: 9771 - protein, 3 aa, Homo sapiens
  Light chain CDR2
GAS

SEQ ID NO: 9772 - protein, 3 aa, Homo sapiens
  Light chain CDR2
GAS

SEQ ID NO: 9773 - protein, 3 aa, Homo sapiens
  Light chain CDR2
GAS

SEQ ID NO: 9774 - protein, 3 aa, Homo sapiens
  Light chain CDR2
GAS

SEQ ID NO: 9775 - protein, 3 aa, Homo sapiens
  Light chain CDR2
GAS

SEQ ID NO: 9776 - protein, 3 aa, Homo sapiens
  Light chain CDR2
GAS

SEQ ID NO: 9777 - protein, 3 aa, Homo sapiens
  Light chain CDR2
GAS

SEQ ID NO: 9778 - protein, 3 aa, Homo sapiens
  Light chain CDR2
GAS

SEQ ID NO: 9779 - protein, 3 aa, Homo sapiens
  Light chain CDR2
GAS

SEQ ID NO: 9780 - protein, 3 aa, Homo sapiens
  Light chain CDR2
GAS

SEQ ID NO: 9781 - protein, 3 aa, Homo sapiens
  Light chain CDR2
GAS

SEQ ID NO: 9782 - protein, 3 aa, Homo sapiens
  Light chain CDR2
GAS

SEQ ID NO: 9783 - protein, 3 aa, Homo sapiens
  Light chain CDR2
GAS

SEQ ID NO: 9784 - protein, 3 aa, Homo sapiens
  Light chain CDR2
GAS

SEQ ID NO: 9785 - protein, 3 aa, Homo sapiens
  Light chain CDR2
GAS

SEQ ID NO: 9786 - protein, 3 aa, Homo sapiens
  Light chain CDR2
GAS

SEQ ID NO: 9787 - protein, 3 aa, Homo sapiens
  Light chain CDR2
GAS

SEQ ID NO: 9788 - protein, 3 aa, Homo sapiens
  Light chain CDR2
GAS

SEQ ID NO: 9789 - protein, 3 aa, Homo sapiens
  Light chain CDR2
GAS

SEQ ID NO: 9790 - protein, 3 aa, Homo sapiens
  Light chain CDR2
GAS

SEQ ID NO: 9791 - protein, 3 aa, Homo sapiens
  Light chain CDR2
GAS

SEQ ID NO: 9792 - protein, 3 aa, Homo sapiens
  Light chain CDR2
AAS

SEQ ID NO: 9793 - protein, 3 aa, Homo sapiens
  Light chain CDR2
GAS

SEQ ID NO: 9794 - protein, 3 aa, Homo sapiens
  Light chain CDR2
AAS

SEQ ID NO: 9795 - protein, 3 aa, Homo sapiens
  Light chain CDR2
GTS

SEQ ID NO: 9796 - protein, 3 aa, Homo sapiens
  Light chain CDR2
GAS

SEQ ID NO: 9797 - protein, 3 aa, Homo sapiens
  Light chain CDR2
GAS

SEQ ID NO: 9798 - protein, 3 aa, Homo sapiens
  Light chain CDR2
GAS

SEQ ID NO: 9799 - protein, 3 aa, Homo sapiens
  Light chain CDR2
GAS

SEQ ID NO: 9800 - protein, 3 aa, Homo sapiens
  Light chain CDR2
AAS

SEQ ID NO: 9801 - protein, 3 aa, Homo sapiens
  Light chain CDR2
GAS

SEQ ID NO: 9802 - protein, 3 aa, Homo sapiens
  Light chain CDR2
GAS

SEQ ID NO: 9803 - protein, 3 aa, Homo sapiens
  Light chain CDR2
WAS

SEQ ID NO: 9804 - protein, 3 aa, Homo sapiens
  Light chain CDR2
GAS

SEQ ID NO: 9805 - protein, 3 aa, Homo sapiens
  Light chain CDR2
WAS

SEQ ID NO: 9806 - protein, 3 aa, Homo sapiens
  Light chain CDR2
YAS

SEQ ID NO: 9807 - protein, 3 aa, Homo sapiens
  Light chain CDR2
LGS

SEQ ID NO: 9808 - protein, 3 aa, Homo sapiens
  Light chain CDR2
LGS

SEQ ID NO: 9809 - protein, 3 aa, Homo sapiens
  Light chain CDR2
GAS

SEQ ID NO: 9810 - protein, 3 aa, Homo sapiens
  Light chain CDR2
AAS

SEQ ID NO: 9811 - protein, 3 aa, Homo sapiens
  Light chain CDR2
GAS

SEQ ID NO: 9812 - protein, 3 aa, Homo sapiens
  Light chain CDR2
GAS

SEQ ID NO: 9813 - protein, 3 aa, Homo sapiens
  Light chain CDR2
GAS

SEQ ID NO: 9814 - protein, 3 aa, Homo sapiens
  Light chain CDR2
GAS

SEQ ID NO: 9815 - protein, 3 aa, Homo sapiens
  Light chain CDR2
GAS

SEQ ID NO: 9816 - protein, 3 aa, Homo sapiens
  Light chain CDR2
GAS

SEQ ID NO: 9817 - protein, 3 aa, Homo sapiens
  Light chain CDR2
GAS

SEQ ID NO: 9818 - protein, 3 aa, Homo sapiens
  Light chain CDR2
GAS

SEQ ID NO: 9819 - protein, 3 aa, Homo sapiens
  Light chain CDR2
GAS

SEQ ID NO: 9820 - protein, 3 aa, Homo sapiens
  Light chain CDR2
AAS

SEQ ID NO: 9821 - protein, 3 aa, Homo sapiens
  Light chain CDR2
GAS

SEQ ID NO: 9822 - protein, 3 aa, Homo sapiens
  Light chain CDR2
GAS

SEQ ID NO: 9823 - protein, 3 aa, Homo sapiens
  Light chain CDR2
GAS

SEQ ID NO: 9824 - protein, 3 aa, Homo sapiens
  Light chain CDR2
GAS

SEQ ID NO: 9825 - protein, 3 aa, Homo sapiens
  Light chain CDR2
SAS

SEQ ID NO: 9826 - protein, 3 aa, Homo sapiens
  Light chain CDR2
GAS

SEQ ID NO: 9827 - protein, 3 aa, Homo sapiens
  Light chain CDR2
GAS

SEQ ID NO: 9828 - protein, 3 aa, Homo sapiens
  Light chain CDR2
GTS

SEQ ID NO: 9829 - protein, 3 aa, Homo sapiens
  Light chain CDR2
GAS

SEQ ID NO: 9830 - protein, 3 aa, Homo sapiens
  Light chain CDR2
GAS

SEQ ID NO: 9831 - protein, 3 aa, Homo sapiens
  Light chain CDR2
GSS

SEQ ID NO: 9832 - protein, 3 aa, Homo sapiens
  Light chain CDR2
GAS

SEQ ID NO: 9833 - protein, 3 aa, Homo sapiens
  Light chain CDR2
GAS

SEQ ID NO: 9834 - protein, 3 aa, Homo sapiens
  Light chain CDR2
GAS

SEQ ID NO: 9835 - protein, 3 aa, Homo sapiens
  Light chain CDR2
GAS

SEQ ID NO: 9836 - protein, 3 aa, Homo sapiens
  Light chain CDR2
GAS

SEQ ID NO: 9837 - protein, 3 aa, Homo sapiens
  Light chain CDR2
GAS

SEQ ID NO: 9838 - protein, 3 aa, Homo sapiens
  Light chain CDR2
GAS

SEQ ID NO: 9839 - protein, 3 aa, Homo sapiens
  Light chain CDR2
GAS

SEQ ID NO: 9840 - protein, 3 aa, Homo sapiens
  Light chain CDR2
GAS

SEQ ID NO: 9841 - protein, 3 aa, Homo sapiens
  Light chain CDR2
GAS

SEQ ID NO: 9842 - protein, 3 aa, Homo sapiens
  Light chain CDR2
GAS

SEQ ID NO: 9843 - protein, 3 aa, Homo sapiens
  Light chain CDR2
GAS

SEQ ID NO: 9844 - protein, 3 aa, Homo sapiens
  Light chain CDR2
GAS

SEQ ID NO: 9845 - protein, 3 aa, Homo sapiens
  Light chain CDR2
GAS

SEQ ID NO: 9846 - protein, 3 aa, Homo sapiens
  Light chain CDR2
GAS

SEQ ID NO: 9847 - protein, 3 aa, Homo sapiens
  Light chain CDR2
GAS

SEQ ID NO: 9848 - protein, 3 aa, Homo sapiens
  Light chain CDR2
GAS

SEQ ID NO: 9849 - protein, 3 aa, Homo sapiens
  Light chain CDR2
LGS

SEQ ID NO: 9850 - protein, 3 aa, Homo sapiens
  Light chain CDR2
GAS

SEQ ID NO: 9851 - protein, 3 aa, Homo sapiens
  Light chain CDR2
GAS

SEQ ID NO: 9852 - protein, 3 aa, Homo sapiens
  Light chain CDR2
GAS

SEQ ID NO: 9853 - protein, 3 aa, Homo sapiens
  Light chain CDR2
GAS

SEQ ID NO: 9854 - protein, 3 aa, Homo sapiens
  Light chain CDR2
GAS

SEQ ID NO: 9855 - protein, 3 aa, Homo sapiens
  Light chain CDR2
GAS

SEQ ID NO: 9856 - protein, 3 aa, Homo sapiens
  Light chain CDR2
GAS

SEQ ID NO: 9857 - protein, 3 aa, Homo sapiens
  Light chain CDR2
GAS

SEQ ID NO: 9858 - protein, 3 aa, Homo sapiens
  Light chain CDR2
GAS

SEQ ID NO: 9859 - protein, 3 aa, Homo sapiens
  Light chain CDR2
GAS

SEQ ID NO: 9860 - protein, 3 aa, Homo sapiens
  Light chain CDR2
GAS

SEQ ID NO: 9861 - protein, 3 aa, Homo sapiens
  Light chain CDR2
GAS

SEQ ID NO: 9862 - protein, 3 aa, Homo sapiens
  Light chain CDR2
GAS

SEQ ID NO: 9863 - protein, 3 aa, Homo sapiens
  Light chain CDR2
GAS

SEQ ID NO: 9864 - protein, 3 aa, Homo sapiens
  Light chain CDR2
GAS

SEQ ID NO: 9865 - protein, 3 aa, Homo sapiens
  Light chain CDR2
GAS

SEQ ID NO: 9866 - protein, 3 aa, Homo sapiens
  Light chain CDR2
YAS

SEQ ID NO: 9867 - protein, 3 aa, Homo sapiens
  Light chain CDR2
GAS

SEQ ID NO: 9868 - protein, 3 aa, Homo sapiens
  Light chain CDR2
AAS

SEQ ID NO: 9869 - protein, 3 aa, Homo sapiens
  Light chain CDR2
GAS

SEQ ID NO: 9870 - protein, 3 aa, Homo sapiens
  Light chain CDR2
GAS

SEQ ID NO: 9871 - protein, 3 aa, Homo sapiens
  Light chain CDR2
GAS

SEQ ID NO: 9872 - protein, 3 aa, Homo sapiens
  Light chain CDR2
GAS

SEQ ID NO: 9873 - protein, 3 aa, Homo sapiens
  Light chain CDR2
AAS

SEQ ID NO: 9874 - protein, 3 aa, Homo sapiens
  Light chain CDR2
GAS

SEQ ID NO: 9875 - protein, 3 aa, Homo sapiens
  Light chain CDR2
GAS

SEQ ID NO: 9876 - protein, 3 aa, Homo sapiens
  Light chain CDR2
DAS

SEQ ID NO: 9877 - protein, 3 aa, Homo sapiens
  Light chain CDR2
GAS

SEQ ID NO: 9878 - protein, 3 aa, Homo sapiens
  Light chain CDR2
GAS

SEQ ID NO: 9879 - protein, 3 aa, Homo sapiens
  Light chain CDR2
GAS

SEQ ID NO: 9880 - protein, 3 aa, Homo sapiens
  Light chain CDR2
AAS

SEQ ID NO: 9881 - protein, 3 aa, Homo sapiens
  Light chain CDR2
KVS

SEQ ID NO: 9882 - protein, 3 aa, Homo sapiens
  Light chain CDR2
GAS

SEQ ID NO: 9883 - protein, 3 aa, Homo sapiens
  Light chain CDR2
GAS

SEQ ID NO: 9884 - protein, 3 aa, Homo sapiens
  Light chain CDR2
LGS

SEQ ID NO: 9885 - protein, 3 aa, Homo sapiens
  Light chain CDR2
GAS

SEQ ID NO: 9886 - protein, 3 aa, Homo sapiens
  Light chain CDR2
AAS

SEQ ID NO: 9887 - protein, 3 aa, Homo sapiens
  Light chain CDR2
GAS

SEQ ID NO: 9888 - protein, 3 aa, Homo sapiens
  Light chain CDR2
AAS

SEQ ID NO: 9889 - protein, 3 aa, Homo sapiens
  Light chain CDR2
AAS

SEQ ID NO: 9890 - protein, 3 aa, Homo sapiens
  Light chain CDR2
GAS

SEQ ID NO: 9891 - protein, 3 aa, Homo sapiens
  Light chain CDR2
AAS

SEQ ID NO: 9892 - protein, 3 aa, Homo sapiens
  Light chain CDR2
AAS

SEQ ID NO: 9893 - protein, 3 aa, Homo sapiens
  Light chain CDR2
GAS

SEQ ID NO: 9894 - protein, 3 aa, Homo sapiens
  Light chain CDR2
AAS

SEQ ID NO: 9895 - protein, 3 aa, Homo sapiens
  Light chain CDR2
GAS

SEQ ID NO: 9896 - protein, 3 aa, Homo sapiens
  Light chain CDR2
GAS

SEQ ID NO: 9897 - protein, 3 aa, Homo sapiens
  Light chain CDR2
AAS

SEQ ID NO: 9898 - protein, 3 aa, Homo sapiens
  Light chain CDR2
GAS

SEQ ID NO: 9899 - protein, 3 aa, Homo sapiens
  Light chain CDR2
GAS

SEQ ID NO: 9900 - protein, 3 aa, Homo sapiens
  Light chain CDR2
GAS

SEQ ID NO: 9901 - protein, 3 aa, Homo sapiens
  Light chain CDR2
GAS

SEQ ID NO: 9902 - protein, 3 aa, Homo sapiens
  Light chain CDR2
GAS

SEQ ID NO: 9903 - protein, 3 aa, Homo sapiens
  Light chain CDR2
GAS

SEQ ID NO: 9904 - protein, 3 aa, Homo sapiens
  Light chain CDR2
AAS

SEQ ID NO: 9905 - protein, 3 aa, Homo sapiens
  Light chain CDR2
GAS

SEQ ID NO: 9906 - protein, 3 aa, Homo sapiens
  Light chain CDR2
YAS

SEQ ID NO: 9907 - protein, 3 aa, Homo sapiens
  Light chain CDR2
AAS

SEQ ID NO: 9908 - protein, 3 aa, Homo sapiens
  Light chain CDR2
AAS

SEQ ID NO: 9909 - protein, 3 aa, Homo sapiens
  Light chain CDR2
GAS

SEQ ID NO: 9910 - protein, 3 aa, Homo sapiens
  Light chain CDR2
GAS

SEQ ID NO: 9911 - protein, 3 aa, Homo sapiens
  Light chain CDR2
AAS

SEQ ID NO: 9912 - protein, 3 aa, Homo sapiens
  Light chain CDR2
GAS

SEQ ID NO: 9913 - protein, 3 aa, Homo sapiens
  Light chain CDR2
GAS

SEQ ID NO: 9914 - protein, 3 aa, Homo sapiens
  Light chain CDR2
GAS

SEQ ID NO: 9915 - protein, 3 aa, Homo sapiens
  Light chain CDR2
GAS

SEQ ID NO: 9916 - protein, 3 aa, Homo sapiens
  Light chain CDR2
GAS

SEQ ID NO: 9917 - protein, 3 aa, Homo sapiens
  Light chain CDR2
GAS

SEQ ID NO: 9918 - protein, 3 aa, Homo sapiens
  Light chain CDR2
GAS

SEQ ID NO: 9919 - protein, 3 aa, Homo sapiens
  Light chain CDR2
AAS

SEQ ID NO: 9920 - protein, 3 aa, Homo sapiens
  Light chain CDR2
GAS

SEQ ID NO: 9921 - protein, 3 aa, Homo sapiens
  Light chain CDR2
GAS

SEQ ID NO: 9922 - protein, 3 aa, Homo sapiens
  Light chain CDR2
GAS

SEQ ID NO: 9923 - protein, 3 aa, Homo sapiens
  Light chain CDR2
GAS

SEQ ID NO: 9924 - protein, 3 aa, Homo sapiens
  Light chain CDR2
GAS

SEQ ID NO: 9925 - protein, 3 aa, Homo sapiens
  Light chain CDR2
GAS

SEQ ID NO: 9926 - protein, 3 aa, Homo sapiens
  Light chain CDR2
AAS

SEQ ID NO: 9927 - protein, 3 aa, Homo sapiens
  Light chain CDR2
GAS

SEQ ID NO: 9928 - protein, 3 aa, Homo sapiens
  Light chain CDR2
GAS

SEQ ID NO: 9929 - protein, 3 aa, Homo sapiens
  Light chain CDR2
GAS

SEQ ID NO: 9930 - protein, 3 aa, Homo sapiens
  Light chain CDR2
DAS

SEQ ID NO: 9931 - protein, 3 aa, Homo sapiens
  Light chain CDR2
GAS

SEQ ID NO: 9932 - protein, 3 aa, Homo sapiens
  Light chain CDR2
GAS

SEQ ID NO: 9933 - protein, 3 aa, Homo sapiens
  Light chain CDR2
GAS

SEQ ID NO: 9934 - protein, 3 aa, Homo sapiens
  Light chain CDR2
GAS

SEQ ID NO: 9935 - protein, 3 aa, Homo sapiens
  Light chain CDR2
GAS

SEQ ID NO: 9936 - protein, 3 aa, Homo sapiens
  Light chain CDR2
GAS

SEQ ID NO: 9937 - protein, 3 aa, Homo sapiens
  Light chain CDR2
GAS

SEQ ID NO: 9938 - protein, 3 aa, Homo sapiens
  Light chain CDR2
GAS

SEQ ID NO: 9939 - protein, 3 aa, Homo sapiens
  Light chain CDR2
GAS

SEQ ID NO: 9940 - protein, 3 aa, Homo sapiens
  Light chain CDR2
GAS

SEQ ID NO: 9941 - protein, 3 aa, Homo sapiens
  Light chain CDR2
GAS

SEQ ID NO: 9942 - protein, 3 aa, Homo sapiens
  Light chain CDR2
AAS

SEQ ID NO: 9943 - protein, 3 aa, Homo sapiens
  Light chain CDR2
DTS

SEQ ID NO: 9944 - protein, 3 aa, Homo sapiens
  Light chain CDR2
GSS

SEQ ID NO: 9945 - protein, 3 aa, Homo sapiens
  Light chain CDR2
LGS

SEQ ID NO: 9946 - protein, 3 aa, Homo sapiens
  Light chain CDR2
GAS

SEQ ID NO: 9947 - protein, 3 aa, Homo sapiens
  Light chain CDR2
DTS

SEQ ID NO: 9948 - protein, 3 aa, Homo sapiens
  Light chain CDR2
GAS

SEQ ID NO: 9949 - protein, 3 aa, Homo sapiens
  Light chain CDR2
GAS

SEQ ID NO: 9950 - protein, 3 aa, Homo sapiens
  Light chain CDR2
AAS

SEQ ID NO: 9951 - protein, 3 aa, Homo sapiens
  Light chain CDR2
GAS

SEQ ID NO: 9952 - protein, 3 aa, Homo sapiens
  Light chain CDR2
GAS

SEQ ID NO: 9953 - protein, 3 aa, Homo sapiens
  Light chain CDR2
GAS

SEQ ID NO: 9954 - protein, 3 aa, Homo sapiens
  Light chain CDR2
GAS

SEQ ID NO: 9955 - protein, 3 aa, Homo sapiens
  Light chain CDR2
GAS

SEQ ID NO: 9956 - protein, 3 aa, Homo sapiens
  Light chain CDR2
GAS

SEQ ID NO: 9957 - protein, 3 aa, Homo sapiens
  Light chain CDR2
GAS

SEQ ID NO: 9958 - protein, 3 aa, Homo sapiens
  Light chain CDR2
GAS

SEQ ID NO: 9959 - protein, 3 aa, Homo sapiens
  Light chain CDR2
GAS

SEQ ID NO: 9960 - protein, 3 aa, Homo sapiens
  Light chain CDR2
GSS

SEQ ID NO: 9961 - protein, 3 aa, Homo sapiens
  Light chain CDR2
DAS

SEQ ID NO: 9962 - protein, 3 aa, Homo sapiens
  Light chain CDR2
GAS

SEQ ID NO: 9963 - protein, 3 aa, Homo sapiens
  Light chain CDR2
GAS

SEQ ID NO: 9964 - protein, 3 aa, Homo sapiens
  Light chain CDR2
GAS

SEQ ID NO: 9965 - protein, 3 aa, Homo sapiens
  Light chain CDR2
AAS

SEQ ID NO: 9966 - protein, 3 aa, Homo sapiens
  Light chain CDR2
GAS

SEQ ID NO: 9967 - protein, 3 aa, Homo sapiens
  Light chain CDR2
GAS

SEQ ID NO: 9968 - protein, 3 aa, Homo sapiens
  Light chain CDR2
GAS

SEQ ID NO: 9969 - protein, 3 aa, Homo sapiens
  Light chain CDR2
DAS

SEQ ID NO: 9970 - protein, 3 aa, Homo sapiens
  Light chain CDR2
GAS

SEQ ID NO: 9971 - protein, 3 aa, Homo sapiens
  Light chain CDR2
GAS

SEQ ID NO: 9972 - protein, 3 aa, Homo sapiens
  Light chain CDR2
GAS

SEQ ID NO: 9973 - protein, 3 aa, Homo sapiens
  Light chain CDR2
GAS

SEQ ID NO: 9974 - protein, 3 aa, Homo sapiens
  Light chain CDR2
GSS

SEQ ID NO: 9975 - protein, 3 aa, Homo sapiens
  Light chain CDR2
GAS

SEQ ID NO: 9976 - protein, 3 aa, Homo sapiens
  Light chain CDR2
GAS

SEQ ID NO: 9977 - protein, 3 aa, Homo sapiens
  Light chain CDR2
GAS

SEQ ID NO: 9978 - protein, 3 aa, Homo sapiens
  Light chain CDR2
GAS

SEQ ID NO: 9979 - protein, 3 aa, Homo sapiens
  Light chain CDR2
GAS

SEQ ID NO: 9980 - protein, 3 aa, Homo sapiens
  Light chain CDR2
GAS

SEQ ID NO: 9981 - protein, 3 aa, Homo sapiens
  Light chain CDR2
GAS

SEQ ID NO: 9982 - protein, 3 aa, Homo sapiens
  Light chain CDR2
GAS

SEQ ID NO: 9983 - protein, 3 aa, Homo sapiens
  Light chain CDR2
DTS

SEQ ID NO: 9984 - protein, 9 aa, Homo sapiens
  Light chain CDR3
QQSYSTPYT

SEQ ID NO: 9985 - protein, 9 aa, Homo sapiens
  Light chain CDR3
QKYNSAPLT

SEQ ID NO: 9986 - protein, 9 aa, Homo sapiens
  Light chain CDR3
QQYNNWPYT

SEQ ID NO: 9987 - protein, 9 aa, Homo sapiens
  Light chain CDR3
LQHNTYPFT

SEQ ID NO: 9988 - protein, 9 aa, Homo sapiens
  Light chain CDR3
LQHNSYPYT

SEQ ID NO: 9989 - protein, 9 aa, Homo sapiens
  Light chain CDR3
LQHNSYPYT

SEQ ID NO: 9990 - protein, 9 aa, Homo sapiens
  Light chain CDR3
QQFNSYPYT

SEQ ID NO: 9991 - protein, 9 aa, Homo sapiens
  Light chain CDR3
QQYGNSPYT

SEQ ID NO: 9992 - protein, 9 aa, Homo sapiens
  Light chain CDR3
LQHNSYPWT

SEQ ID NO: 9993 - protein, 9 aa, Homo sapiens
  Light chain CDR3
LQHNSYPWT

SEQ ID NO: 9994 - protein, 9 aa, Homo sapiens
  Light chain CDR3
LQHNSYPWT

SEQ ID NO: 9995 - protein, 9 aa, Homo sapiens
  Light chain CDR3
LQHNSYPFT

SEQ ID NO: 9996 - protein, 9 aa, Homo sapiens
  Light chain CDR3
QQYGSSPRT

SEQ ID NO: 9997 - protein, 8 aa, Homo sapiens
  Light chain CDR3
QQYGSSYT

SEQ ID NO: 9998 - protein, 9 aa, Homo sapiens
  Light chain CDR3
QKYNSAPYT

SEQ ID NO: 9999 - protein, 9 aa, Homo sapiens
  Light chain CDR3
QQLNSYPRT

SEQ ID NO: 10000 - protein, 9 aa, Homo sapiens
  Light chain CDR3
LQHNSYPWT

SEQ ID NO: 10001 - protein, 9 aa, Homo sapiens
  Light chain CDR3
QQSYSTPIT

SEQ ID NO: 10002 - protein, 9 aa, Homo sapiens
  Light chain CDR3
QQLNSYPYT

SEQ ID NO: 10003 - protein, 9 aa, Homo sapiens
  Light chain CDR3
QQSYSTPYT

SEQ ID NO: 10004 - protein, 9 aa, Homo sapiens
  Light chain CDR3
QQSYSTPYT

SEQ ID NO: 10005 - protein, 9 aa, Homo sapiens
  Light chain CDR3
QQSYSTPIT

SEQ ID NO: 10006 - protein, 9 aa, Homo sapiens
  Light chain CDR3
QQSYSYPYT

SEQ ID NO: 10007 - protein, 9 aa, Homo sapiens
  Light chain CDR3
QQSYSTPYT

SEQ ID NO: 10008 - protein, 9 aa, Homo sapiens
  Light chain CDR3
QQFNSYPYT

SEQ ID NO: 10009 - protein, 9 aa, Homo sapiens
  Light chain CDR3
QQSYSTPYT

SEQ ID NO: 10010 - protein, 9 aa, Homo sapiens
  Light chain CDR3
LQHNSYPWT

SEQ ID NO: 10011 - protein, 9 aa, Homo sapiens
  Light chain CDR3
QQLNSYPRT

SEQ ID NO: 10012 - protein, 9 aa, Homo sapiens
  Light chain CDR3
QQYGSSPYT

SEQ ID NO: 10013 - protein, 9 aa, Homo sapiens
  Light chain CDR3
QQSYSTPYT

SEQ ID NO: 10014 - protein, 9 aa, Homo sapiens
  Light chain CDR3
LQDYNYPWT

SEQ ID NO: 10015 - protein, 8 aa, Homo sapiens
  Light chain CDR3
QQYGSSYT

SEQ ID NO: 10016 - protein, 9 aa, Homo sapiens
  Light chain CDR3
QQSYSTPYT

SEQ ID NO: 10017 - protein, 9 aa, Homo sapiens
  Light chain CDR3
QQSYSTPYT

SEQ ID NO: 10018 - protein, 9 aa, Homo sapiens
  Light chain CDR3
LQHNSYPWT

SEQ ID NO: 10019 - protein, 9 aa, Homo sapiens
  Light chain CDR3
QQFNSYPYT

SEQ ID NO: 10020 - protein, 9 aa, Homo sapiens
  Light chain CDR3
QQSYSTPYT

SEQ ID NO: 10021 - protein, 9 aa, Homo sapiens
  Light chain CDR3
QQSYSTPYT

SEQ ID NO: 10022 - protein, 8 aa, Homo sapiens
  Light chain CDR3
QQYGSSYT

SEQ ID NO: 10023 - protein, 9 aa, Homo sapiens
  Light chain CDR3
LQHNSYPWT

SEQ ID NO: 10024 - protein, 9 aa, Homo sapiens
  Light chain CDR3
QQDYNLPYT

SEQ ID NO: 10025 - protein, 9 aa, Homo sapiens
  Light chain CDR3
QQSYSNPLT

SEQ ID NO: 10026 - protein, 9 aa, Homo sapiens
  Light chain CDR3
QQSYSTPYT

SEQ ID NO: 10027 - protein, 9 aa, Homo sapiens
  Light chain CDR3
QQDYNLPLT

SEQ ID NO: 10028 - protein, 9 aa, Homo sapiens
  Light chain CDR3
QQFNSYPYT

SEQ ID NO: 10029 - protein, 9 aa, Homo sapiens
  Light chain CDR3
LQHNSYPWT

SEQ ID NO: 10030 - protein, 9 aa, Homo sapiens
  Light chain CDR3
QQSYSTPFT

SEQ ID NO: 10031 - protein, 9 aa, Homo sapiens
  Light chain CDR3
QQSYSTPFT

SEQ ID NO: 10032 - protein, 9 aa, Homo sapiens
  Light chain CDR3
QQYGSSPWT

SEQ ID NO: 10033 - protein, 9 aa, Homo sapiens
  Light chain CDR3
QQYGSSPFT

SEQ ID NO: 10034 - protein, 9 aa, Homo sapiens
  Light chain CDR3
QQYDNLPIT

SEQ ID NO: 10035 - protein, 9 aa, Homo sapiens
  Light chain CDR3
QQYGSSPWT

SEQ ID NO: 10036 - protein, 9 aa, Homo sapiens
  Light chain CDR3
QQYGSSPWT

SEQ ID NO: 10037 - protein, 9 aa, Homo sapiens
  Light chain CDR3
MQALQTPLT

SEQ ID NO: 10038 - protein, 9 aa, Homo sapiens
  Light chain CDR3
QQSYSTPFT

SEQ ID NO: 10039 - protein, 9 aa, Homo sapiens
  Light chain CDR3
QQYGSSPWT

SEQ ID NO: 10040 - protein, 9 aa, Homo sapiens
  Light chain CDR3
QQYGRSPWT

SEQ ID NO: 10041 - protein, 9 aa, Homo sapiens
  Light chain CDR3
QQYGNSPWT

SEQ ID NO: 10042 - protein, 9 aa, Homo sapiens
  Light chain CDR3
QQSYSTPFT

SEQ ID NO: 10043 - protein, 9 aa, Homo sapiens
  Light chain CDR3
QQYGTSPWT

SEQ ID NO: 10044 - protein, 9 aa, Homo sapiens
  Light chain CDR3
QQSYSTPFT

SEQ ID NO: 10045 - protein, 9 aa, Homo sapiens
  Light chain CDR3
QQYGSSPFT

SEQ ID NO: 10046 - protein, 9 aa, Homo sapiens
  Light chain CDR3
QQYGSSPFT

SEQ ID NO: 10047 - protein, 9 aa, Homo sapiens
  Light chain CDR3
QQYGSSPFT

SEQ ID NO: 10048 - protein, 9 aa, Homo sapiens
  Light chain CDR3
QQYGSSPWT

SEQ ID NO: 10049 - protein, 9 aa, Homo sapiens
  Light chain CDR3
MQALQTPLT

SEQ ID NO: 10050 - protein, 9 aa, Homo sapiens
  Light chain CDR3
QQYGSSPFT

SEQ ID NO: 10051 - protein, 9 aa, Homo sapiens
  Light chain CDR3
QQSYSTPFT

SEQ ID NO: 10052 - protein, 9 aa, Homo sapiens
  Light chain CDR3
QQSYSTPFT

SEQ ID NO: 10053 - protein, 9 aa, Homo sapiens
  Light chain CDR3
QQGYSTPFT

SEQ ID NO: 10054 - protein, 9 aa, Homo sapiens
  Light chain CDR3
QQYGSSPWT

SEQ ID NO: 10055 - protein, 9 aa, Homo sapiens
  Light chain CDR3
QQSYSTPFA

SEQ ID NO: 10056 - protein, 9 aa, Homo sapiens
  Light chain CDR3
QQSYSTPFT

SEQ ID NO: 10057 - protein, 9 aa, Homo sapiens
  Light chain CDR3
QQYGSSPFT

SEQ ID NO: 10058 - protein, 9 aa, Homo sapiens
  Light chain CDR3
QQSYSTPFT

SEQ ID NO: 10059 - protein, 9 aa, Homo sapiens
  Light chain CDR3
QQYGSSPWT

SEQ ID NO: 10060 - protein, 9 aa, Homo sapiens
  Light chain CDR3
QQSYSTPFT

SEQ ID NO: 10061 - protein, 9 aa, Homo sapiens
  Light chain CDR3
QQYGSSPWT

SEQ ID NO: 10062 - protein, 9 aa, Homo sapiens
  Light chain CDR3
QQYGSSPWT

SEQ ID NO: 10063 - protein, 9 aa, Homo sapiens
  Light chain CDR3
QQSYSTPFT

SEQ ID NO: 10064 - protein, 9 aa, Homo sapiens
  Light chain CDR3
QQSYSTPFT

SEQ ID NO: 10065 - protein, 9 aa, Homo sapiens
  Light chain CDR3
QQFGSSPWT

SEQ ID NO: 10066 - protein, 9 aa, Homo sapiens
  Light chain CDR3
QQLNSYPRT

SEQ ID NO: 10067 - protein, 9 aa, Homo sapiens
  Light chain CDR3
MQALQTPLT

SEQ ID NO: 10068 - protein, 9 aa, Homo sapiens
  Light chain CDR3
QQYGTSPWT

SEQ ID NO: 10069 - protein, 9 aa, Homo sapiens
  Light chain CDR3
QQYGTSPFT

SEQ ID NO: 10070 - protein, 9 aa, Homo sapiens
  Light chain CDR3
QQYGNSPWT

SEQ ID NO: 10071 - protein, 9 aa, Homo sapiens
  Light chain CDR3
QQSYSTPYT

SEQ ID NO: 10072 - protein, 9 aa, Homo sapiens
  Light chain CDR3
LQHNSYPWT

SEQ ID NO: 10073 - protein, 9 aa, Homo sapiens
  Light chain CDR3
MQALQTPLT

SEQ ID NO: 10074 - protein, 9 aa, Homo sapiens
  Light chain CDR3
QQYGSSPFT

SEQ ID NO: 10075 - protein, 9 aa, Homo sapiens
  Light chain CDR3
LQHNSYPRT

SEQ ID NO: 10076 - protein, 9 aa, Homo sapiens
  Light chain CDR3
LQHNSYPWT

SEQ ID NO: 10077 - protein, 9 aa, Homo sapiens
  Light chain CDR3
QQYGNSPWT

SEQ ID NO: 10078 - protein, 9 aa, Homo sapiens
  Light chain CDR3
LQDYNYPRT

SEQ ID NO: 10079 - protein, 9 aa, Homo sapiens
  Light chain CDR3
LQDYNYPYT

SEQ ID NO: 10080 - protein, 9 aa, Homo sapiens
  Light chain CDR3
QQLNSYPRT

SEQ ID NO: 10081 - protein, 9 aa, Homo sapiens
  Light chain CDR3
QQSYSTPFT

SEQ ID NO: 10082 - protein, 9 aa, Homo sapiens
  Light chain CDR3
LQDYNYPRT

SEQ ID NO: 10083 - protein, 9 aa, Homo sapiens
  Light chain CDR3
MQALQTPLT

SEQ ID NO: 10084 - protein, 9 aa, Homo sapiens
  Light chain CDR3
LQHNSYPWT

SEQ ID NO: 10085 - protein, 9 aa, Homo sapiens
  Light chain CDR3
LQLNSYPRT

SEQ ID NO: 10086 - protein, 9 aa, Homo sapiens
  Light chain CDR3
LQNYNYPRT

SEQ ID NO: 10087 - protein, 9 aa, Homo sapiens
  Light chain CDR3
QQDYNLPYT

SEQ ID NO: 10088 - protein, 9 aa, Homo sapiens
  Light chain CDR3
QQSYSTPYT

SEQ ID NO: 10089 - protein, 9 aa, Homo sapiens
  Light chain CDR3
QQLNSYPRT

SEQ ID NO: 10090 - protein, 9 aa, Homo sapiens
  Light chain CDR3
LQHNSYPWT

SEQ ID NO: 10091 - protein, 9 aa, Homo sapiens
  Light chain CDR3
QQYNSYPYT

SEQ ID NO: 10092 - protein, 9 aa, Homo sapiens
  Light chain CDR3
LQDYNYPWT

SEQ ID NO: 10093 - protein, 9 aa, Homo sapiens
  Light chain CDR3
QQYNSYPRT

SEQ ID NO: 10094 - protein, 9 aa, Homo sapiens
  Light chain CDR3
QQSYSTPFT

SEQ ID NO: 10095 - protein, 9 aa, Homo sapiens
  Light chain CDR3
QQYGSSPLT

SEQ ID NO: 10096 - protein, 9 aa, Homo sapiens
  Light chain CDR3
LQHNSYPYT

SEQ ID NO: 10097 - protein, 9 aa, Homo sapiens
  Light chain CDR3
QQSYSTPFT

SEQ ID NO: 10098 - protein, 9 aa, Homo sapiens
  Light chain CDR3
QQSYSTPFT

SEQ ID NO: 10099 - protein, 9 aa, Homo sapiens
  Light chain CDR3
LQLNSYPRT

SEQ ID NO: 10100 - protein, 9 aa, Homo sapiens
  Light chain CDR3
LQDYNYPWT

SEQ ID NO: 10101 - protein, 9 aa, Homo sapiens
  Light chain CDR3
LQHNSYPRT

SEQ ID NO: 10102 - protein, 9 aa, Homo sapiens
  Light chain CDR3
KQSYSTPYT

SEQ ID NO: 10103 - protein, 9 aa, Homo sapiens
  Light chain CDR3
QQYGNSPWT

SEQ ID NO: 10104 - protein, 9 aa, Homo sapiens
  Light chain CDR3
LQRNSYPWT

SEQ ID NO: 10105 - protein, 9 aa, Homo sapiens
  Light chain CDR3
QQFGSSPWT

SEQ ID NO: 10106 - protein, 9 aa, Homo sapiens
  Light chain CDR3
LQHNSYPWT

SEQ ID NO: 10107 - protein, 9 aa, Homo sapiens
  Light chain CDR3
RQLNSYPWT

SEQ ID NO: 10108 - protein, 9 aa, Homo sapiens
  Light chain CDR3
QQYNSYPRT

SEQ ID NO: 10109 - protein, 9 aa, Homo sapiens
  Light chain CDR3
QQLNSYPWT

SEQ ID NO: 10110 - protein, 9 aa, Homo sapiens
  Light chain CDR3
KQLNSYPRT

SEQ ID NO: 10111 - protein, 9 aa, Homo sapiens
  Light chain CDR3
QQFGSSPWT

SEQ ID NO: 10112 - protein, 9 aa, Homo sapiens
  Light chain CDR3
QQLNSYPRT

SEQ ID NO: 10113 - protein, 9 aa, Homo sapiens
  Light chain CDR3
MQALQTPLT

SEQ ID NO: 10114 - protein, 9 aa, Homo sapiens
  Light chain CDR3
QQSYSTPYT

SEQ ID NO: 10115 - protein, 9 aa, Homo sapiens
  Light chain CDR3
QQYGSSPWT

SEQ ID NO: 10116 - protein, 9 aa, Homo sapiens
  Light chain CDR3
QQYNSYPYT

SEQ ID NO: 10117 - protein, 9 aa, Homo sapiens
  Light chain CDR3
QQYKSYPYT

SEQ ID NO: 10118 - protein, 9 aa, Homo sapiens
  Light chain CDR3
QQYGNSPFT

SEQ ID NO: 10119 - protein, 9 aa, Homo sapiens
  Light chain CDR3
QQYKSYPYT

SEQ ID NO: 10120 - protein, 9 aa, Homo sapiens
  Light chain CDR3
QQYGSSPFT

SEQ ID NO: 10121 - protein, 9 aa, Homo sapiens
  Light chain CDR3
QQYGSSPWT

SEQ ID NO: 10122 - protein, 9 aa, Homo sapiens
  Light chain CDR3
QQYGRSPFT

SEQ ID NO: 10123 - protein, 9 aa, Homo sapiens
  Light chain CDR3
QQYGRSPFT

SEQ ID NO: 10124 - protein, 9 aa, Homo sapiens
  Light chain CDR3
QRTYSAPYT

SEQ ID NO: 10125 - protein, 9 aa, Homo sapiens
  Light chain CDR3
QQLNNYPYT

SEQ ID NO: 10126 - protein, 9 aa, Homo sapiens
  Light chain CDR3
QQYGSSPFT

SEQ ID NO: 10127 - protein, 9 aa, Homo sapiens
  Light chain CDR3
QRTYNAPYT

SEQ ID NO: 10128 - protein, 9 aa, Homo sapiens
  Light chain CDR3
QQFGSSPWT

SEQ ID NO: 10129 - protein, 9 aa, Homo sapiens
  Light chain CDR3
QQYGSSPFT

SEQ ID NO: 10130 - protein, 9 aa, Homo sapiens
  Light chain CDR3
QQYGSSPFT

SEQ ID NO: 10131 - protein, 9 aa, Homo sapiens
  Light chain CDR3
QQYGSSPWT

SEQ ID NO: 10132 - protein, 9 aa, Homo sapiens
  Light chain CDR3
HQSSSLPFT

SEQ ID NO: 10133 - protein, 9 aa, Homo sapiens
  Light chain CDR3
QQYGTSPWT

SEQ ID NO: 10134 - protein, 9 aa, Homo sapiens
  Light chain CDR3
HQSSSLPFT

SEQ ID NO: 10135 - protein, 9 aa, Homo sapiens
  Light chain CDR3
QQDYNLPFT

SEQ ID NO: 10136 - protein, 9 aa, Homo sapiens
  Light chain CDR3
QQFGSSPFT

SEQ ID NO: 10137 - protein, 9 aa, Homo sapiens
  Light chain CDR3
QQYKSYPYT

SEQ ID NO: 10138 - protein, 9 aa, Homo sapiens
  Light chain CDR3
QQYKSYPYT

SEQ ID NO: 10139 - protein, 9 aa, Homo sapiens
  Light chain CDR3
QKYDSAPFT

SEQ ID NO: 10140 - protein, 9 aa, Homo sapiens
  Light chain CDR3
QQLNNYPYT

SEQ ID NO: 10141 - protein, 9 aa, Homo sapiens
  Light chain CDR3
QQYGSSPWT

SEQ ID NO: 10142 - protein, 9 aa, Homo sapiens
  Light chain CDR3
QQLNNYPST

SEQ ID NO: 10143 - protein, 9 aa, Homo sapiens
  Light chain CDR3
QQYKSYPYT

SEQ ID NO: 10144 - protein, 9 aa, Homo sapiens
  Light chain CDR3
QQLNNYPCT

SEQ ID NO: 10145 - protein, 9 aa, Homo sapiens
  Light chain CDR3
QQYGSSPWT

SEQ ID NO: 10146 - protein, 9 aa, Homo sapiens
  Light chain CDR3
QQLNNYPYT

SEQ ID NO: 10147 - protein, 9 aa, Homo sapiens
  Light chain CDR3
QQFGRSPFT

SEQ ID NO: 10148 - protein, 9 aa, Homo sapiens
  Light chain CDR3
QQYGSSPWT

SEQ ID NO: 10149 - protein, 9 aa, Homo sapiens
  Light chain CDR3
QQYGTSPFT

SEQ ID NO: 10150 - protein, 9 aa, Homo sapiens
  Light chain CDR3
QQYGSSPFT

SEQ ID NO: 10151 - protein, 9 aa, Homo sapiens
  Light chain CDR3
QQYGRSPFT

SEQ ID NO: 10152 - protein, 9 aa, Homo sapiens
  Light chain CDR3
QQYKSYPYT

SEQ ID NO: 10153 - protein, 9 aa, Homo sapiens
  Light chain CDR3
QQYSRSPWT

SEQ ID NO: 10154 - protein, 9 aa, Homo sapiens
  Light chain CDR3
QQYKTYPYT

SEQ ID NO: 10155 - protein, 9 aa, Homo sapiens
  Light chain CDR3
QQYGSSPWT

SEQ ID NO: 10156 - protein, 9 aa, Homo sapiens
  Light chain CDR3
QQFGSSPFT

SEQ ID NO: 10157 - protein, 9 aa, Homo sapiens
  Light chain CDR3
QQYGSSPFT

SEQ ID NO: 10158 - protein, 9 aa, Homo sapiens
  Light chain CDR3
QQYGSSPWT

SEQ ID NO: 10159 - protein, 9 aa, Homo sapiens
  Light chain CDR3
QQYGRSPWT

SEQ ID NO: 10160 - protein, 9 aa, Homo sapiens
  Light chain CDR3
QQYNSYPYT

SEQ ID NO: 10161 - protein, 9 aa, Homo sapiens
  Light chain CDR3
QQYGSSPFT

SEQ ID NO: 10162 - protein, 9 aa, Homo sapiens
  Light chain CDR3
HQYGSSPFT

SEQ ID NO: 10163 - protein, 9 aa, Homo sapiens
  Light chain CDR3
QQYGSSPWT

SEQ ID NO: 10164 - protein, 9 aa, Homo sapiens
  Light chain CDR3
QQYKSYPYT

SEQ ID NO: 10165 - protein, 9 aa, Homo sapiens
  Light chain CDR3
QQYNSYPYT

SEQ ID NO: 10166 - protein, 9 aa, Homo sapiens
  Light chain CDR3
QQYGSSPFT

SEQ ID NO: 10167 - protein, 9 aa, Homo sapiens
  Light chain CDR3
HQSSSLPFT

SEQ ID NO: 10168 - protein, 9 aa, Homo sapiens
  Light chain CDR3
QKYDSAPFT

SEQ ID NO: 10169 - protein, 9 aa, Homo sapiens
  Light chain CDR3
QRTYSAPYT

SEQ ID NO: 10170 - protein, 9 aa, Homo sapiens
  Light chain CDR3
QRTYSAPYT

SEQ ID NO: 10171 - protein, 9 aa, Homo sapiens
  Light chain CDR3
QQYGSSPWT

SEQ ID NO: 10172 - protein, 9 aa, Homo sapiens
  Light chain CDR3
QQYGSSPFT

SEQ ID NO: 10173 - protein, 9 aa, Homo sapiens
  Light chain CDR3
QQYGTSPWT

SEQ ID NO: 10174 - protein, 9 aa, Homo sapiens
  Light chain CDR3
QQYKNYPYT

SEQ ID NO: 10175 - protein, 9 aa, Homo sapiens
  Light chain CDR3
QRTYNAPYT

SEQ ID NO: 10176 - protein, 9 aa, Homo sapiens
  Light chain CDR3
QQYKSYPYT

SEQ ID NO: 10177 - protein, 9 aa, Homo sapiens
  Light chain CDR3
QQYGSSPFT

SEQ ID NO: 10178 - protein, 9 aa, Homo sapiens
  Light chain CDR3
QRTYSAPYT

SEQ ID NO: 10179 - protein, 9 aa, Homo sapiens
  Light chain CDR3
QQLNNYPYT

SEQ ID NO: 10180 - protein, 9 aa, Homo sapiens
  Light chain CDR3
QQYGSSPWT

SEQ ID NO: 10181 - protein, 9 aa, Homo sapiens
  Light chain CDR3
QQYGSSPWT

SEQ ID NO: 10182 - protein, 9 aa, Homo sapiens
  Light chain CDR3
QQYKSYPYT

SEQ ID NO: 10183 - protein, 9 aa, Homo sapiens
  Light chain CDR3
QQYNSYPYT

SEQ ID NO: 10184 - protein, 9 aa, Homo sapiens
  Light chain CDR3
QQYGSSPWT

SEQ ID NO: 10185 - protein, 9 aa, Homo sapiens
  Light chain CDR3
QQYGSSPFT

SEQ ID NO: 10186 - protein, 9 aa, Homo sapiens
  Light chain CDR3
QQYKTYPYT

SEQ ID NO: 10187 - protein, 9 aa, Homo sapiens
  Light chain CDR3
QQYGRSPFT

SEQ ID NO: 10188 - protein, 9 aa, Homo sapiens
  Light chain CDR3
QRTYSAPYT

SEQ ID NO: 10189 - protein, 9 aa, Homo sapiens
  Light chain CDR3
QQYGSSPWT

SEQ ID NO: 10190 - protein, 9 aa, Homo sapiens
  Light chain CDR3
QQYGRSPFT

SEQ ID NO: 10191 - protein, 9 aa, Homo sapiens
  Light chain CDR3
LRYGTSPFT

SEQ ID NO: 10192 - protein, 9 aa, Homo sapiens
  Light chain CDR3
QQDYNLPFT

SEQ ID NO: 10193 - protein, 9 aa, Homo sapiens
  Light chain CDR3
QQYRSYPYT

SEQ ID NO: 10194 - protein, 9 aa, Homo sapiens
  Light chain CDR3
QQYSRSPWT

SEQ ID NO: 10195 - protein, 9 aa, Homo sapiens
  Light chain CDR3
QQYGSSPFT

SEQ ID NO: 10196 - protein, 9 aa, Homo sapiens
  Light chain CDR3
QQYGTSPWT

SEQ ID NO: 10197 - protein, 9 aa, Homo sapiens
  Light chain CDR3
QQYKSYPYT

SEQ ID NO: 10198 - protein, 9 aa, Homo sapiens
  Light chain CDR3
QQYKSYPYT

SEQ ID NO: 10199 - protein, 9 aa, Homo sapiens
  Light chain CDR3
QRTYSAPYT

SEQ ID NO: 10200 - protein, 9 aa, Homo sapiens
  Light chain CDR3
QQYGSSPFT

SEQ ID NO: 10201 - protein, 9 aa, Homo sapiens
  Light chain CDR3
QQLNNYPYT

SEQ ID NO: 10202 - protein, 9 aa, Homo sapiens
  Light chain CDR3
QQYGRSPWT

SEQ ID NO: 10203 - protein, 9 aa, Homo sapiens
  Light chain CDR3
QQYGSSPWT

SEQ ID NO: 10204 - protein, 9 aa, Homo sapiens
  Light chain CDR3
QQFGSSPFT

SEQ ID NO: 10205 - protein, 9 aa, Homo sapiens
  Light chain CDR3
QQYNSYPYT

SEQ ID NO: 10206 - protein, 9 aa, Homo sapiens
  Light chain CDR3
QQYNSYPYT

SEQ ID NO: 10207 - protein, 9 aa, Homo sapiens
  Light chain CDR3
QQYKNYPYT

SEQ ID NO: 10208 - protein, 9 aa, Homo sapiens
  Light chain CDR3
QQYNSYPYT

SEQ ID NO: 10209 - protein, 9 aa, Homo sapiens
  Light chain CDR3
LQDYNLPFT

SEQ ID NO: 10210 - protein, 9 aa, Homo sapiens
  Light chain CDR3
QQYKSYPFT

SEQ ID NO: 10211 - protein, 9 aa, Homo sapiens
  Light chain CDR3
QQYNSYPYT

SEQ ID NO: 10212 - protein, 9 aa, Homo sapiens
  Light chain CDR3
QQYKSYPYT

SEQ ID NO: 10213 - protein, 9 aa, Homo sapiens
  Light chain CDR3
QQYKSYPYT

SEQ ID NO: 10214 - protein, 9 aa, Homo sapiens
  Light chain CDR3
QQYRSYPYT

SEQ ID NO: 10215 - protein, 9 aa, Homo sapiens
  Light chain CDR3
QQLNNYPYT

SEQ ID NO: 10216 - protein, 9 aa, Homo sapiens
  Light chain CDR3
QQYKSYPYT

SEQ ID NO: 10217 - protein, 9 aa, Homo sapiens
  Light chain CDR3
QQDYNLPFT

SEQ ID NO: 10218 - protein, 9 aa, Homo sapiens
  Light chain CDR3
QQYKSYPYT

SEQ ID NO: 10219 - protein, 9 aa, Homo sapiens
  Light chain CDR3
QQYGRSPWT

SEQ ID NO: 10220 - protein, 9 aa, Homo sapiens
  Light chain CDR3
QQDYNLPFT

SEQ ID NO: 10221 - protein, 9 aa, Homo sapiens
  Light chain CDR3
QQYKSYPYT

SEQ ID NO: 10222 - protein, 9 aa, Homo sapiens
  Light chain CDR3
QQYGSSPWT

SEQ ID NO: 10223 - protein, 9 aa, Homo sapiens
  Light chain CDR3
QQYGISPFT

SEQ ID NO: 10224 - protein, 9 aa, Homo sapiens
  Light chain CDR3
QQFGSSPWT

SEQ ID NO: 10225 - protein, 9 aa, Homo sapiens
  Light chain CDR3
QQYGSSPFT

SEQ ID NO: 10226 - protein, 9 aa, Homo sapiens
  Light chain CDR3
QQYGSSPWT

SEQ ID NO: 10227 - protein, 9 aa, Homo sapiens
  Light chain CDR3
QQYGSSPFT

SEQ ID NO: 10228 - protein, 9 aa, Homo sapiens
  Light chain CDR3
QQYGNSPFT

SEQ ID NO: 10229 - protein, 9 aa, Homo sapiens
  Light chain CDR3
MQSLQTPPT

SEQ ID NO: 10230 - protein, 9 aa, Homo sapiens
  Light chain CDR3
QQYGRSPWT

SEQ ID NO: 10231 - protein, 9 aa, Homo sapiens
  Light chain CDR3
QQSYSIPLT

SEQ ID NO: 10232 - protein, 9 aa, Homo sapiens
  Light chain CDR3
MQSLQTPPT

SEQ ID NO: 10233 - protein, 9 aa, Homo sapiens
  Light chain CDR3
HQSSSLPFT

SEQ ID NO: 10234 - protein, 9 aa, Homo sapiens
  Light chain CDR3
QQYGISPFT

SEQ ID NO: 10235 - protein, 9 aa, Homo sapiens
  Light chain CDR3
QLYNSYPFT

SEQ ID NO: 10236 - protein, 9 aa, Homo sapiens
  Light chain CDR3
QQYGISPFT

SEQ ID NO: 10237 - protein, 9 aa, Homo sapiens
  Light chain CDR3
QQFGSSPFT

SEQ ID NO: 10238 - protein, 9 aa, Homo sapiens
  Light chain CDR3
QQYGSSPWT

SEQ ID NO: 10239 - protein, 9 aa, Homo sapiens
  Light chain CDR3
QQYGSSPFT

SEQ ID NO: 10240 - protein, 9 aa, Homo sapiens
  Light chain CDR3
QQDYNLPFT

SEQ ID NO: 10241 - protein, 9 aa, Homo sapiens
  Light chain CDR3
QQYGSSPFT

SEQ ID NO: 10242 - protein, 9 aa, Homo sapiens
  Light chain CDR3
QQYGSSPWT

SEQ ID NO: 10243 - protein, 9 aa, Homo sapiens
  Light chain CDR3
QQDYNLPFT

SEQ ID NO: 10244 - protein, 9 aa, Homo sapiens
  Light chain CDR3
QQYGSSPWT

SEQ ID NO: 10245 - protein, 9 aa, Homo sapiens
  Light chain CDR3
QHYGSSPWT

SEQ ID NO: 10246 - protein, 9 aa, Homo sapiens
  Light chain CDR3
QQYGSSPFT

SEQ ID NO: 10247 - protein, 9 aa, Homo sapiens
  Light chain CDR3
QQYGSSPWT

SEQ ID NO: 10248 - protein, 9 aa, Homo sapiens
  Light chain CDR3
QQFGSSPWT

SEQ ID NO: 10249 - protein, 9 aa, Homo sapiens
  Light chain CDR3
QQYGSSPFT

SEQ ID NO: 10250 - protein, 9 aa, Homo sapiens
  Light chain CDR3
QQYGSSPWA

SEQ ID NO: 10251 - protein, 9 aa, Homo sapiens
  Light chain CDR3
QQYGISPFT

SEQ ID NO: 10252 - protein, 9 aa, Homo sapiens
  Light chain CDR3
QQYGISPFT

SEQ ID NO: 10253 - protein, 9 aa, Homo sapiens
  Light chain CDR3
QQYGSSPFT

SEQ ID NO: 10254 - protein, 9 aa, Homo sapiens
  Light chain CDR3
QQLGSSPFT

SEQ ID NO: 10255 - protein, 9 aa, Homo sapiens
  Light chain CDR3
QQYGSSPFT

SEQ ID NO: 10256 - protein, 9 aa, Homo sapiens
  Light chain CDR3
MQALQTPLT

SEQ ID NO: 10257 - protein, 9 aa, Homo sapiens
  Light chain CDR3
QQYGSSPWT

SEQ ID NO: 10258 - protein, 9 aa, Homo sapiens
  Light chain CDR3
QQYGSSPWT

SEQ ID NO: 10259 - protein, 9 aa, Homo sapiens
  Light chain CDR3
QQYGSSPWT

SEQ ID NO: 10260 - protein, 9 aa, Homo sapiens
  Light chain CDR3
QQYGSSPFT

SEQ ID NO: 10261 - protein, 9 aa, Homo sapiens
  Light chain CDR3
QQYGSSPFT

SEQ ID NO: 10262 - protein, 9 aa, Homo sapiens
  Light chain CDR3
QQYGISPFT

SEQ ID NO: 10263 - protein, 9 aa, Homo sapiens
  Light chain CDR3
QQYGSSPWT

SEQ ID NO: 10264 - protein, 9 aa, Homo sapiens
  Light chain CDR3
QQYGSSPWT

SEQ ID NO: 10265 - protein, 9 aa, Homo sapiens
  Light chain CDR3
QHYGSSPWT

SEQ ID NO: 10266 - protein, 9 aa, Homo sapiens
  Light chain CDR3
QQYGSSPFT

SEQ ID NO: 10267 - protein, 9 aa, Homo sapiens
  Light chain CDR3
QHYGSSPWT

SEQ ID NO: 10268 - protein, 9 aa, Homo sapiens
  Light chain CDR3
QQYGSSPFT

SEQ ID NO: 10269 - protein, 9 aa, Homo sapiens
  Light chain CDR3
QQYGSSPFT

SEQ ID NO: 10270 - protein, 9 aa, Homo sapiens
  Light chain CDR3
QQYGSSPFT

SEQ ID NO: 10271 - protein, 9 aa, Homo sapiens
  Light chain CDR3
QQYGISPFT

SEQ ID NO: 10272 - protein, 9 aa, Homo sapiens
  Light chain CDR3
QQYGTSPFT

SEQ ID NO: 10273 - protein, 9 aa, Homo sapiens
  Light chain CDR3
QQYGSSPFT

SEQ ID NO: 10274 - protein, 9 aa, Homo sapiens
  Light chain CDR3
QQYGSSPFT

SEQ ID NO: 10275 - protein, 9 aa, Homo sapiens
  Light chain CDR3
QQYGSSPFT

SEQ ID NO: 10276 - protein, 9 aa, Homo sapiens
  Light chain CDR3
QQYGTSPFT

SEQ ID NO: 10277 - protein, 9 aa, Homo sapiens
  Light chain CDR3
QQYGSSPFT

SEQ ID NO: 10278 - protein, 9 aa, Homo sapiens
  Light chain CDR3
QQYGSSPFT

SEQ ID NO: 10279 - protein, 9 aa, Homo sapiens
  Light chain CDR3
QQYGSSPWT

SEQ ID NO: 10280 - protein, 9 aa, Homo sapiens
  Light chain CDR3
QQYGSSPFT

SEQ ID NO: 10281 - protein, 9 aa, Homo sapiens
  Light chain CDR3
QQYGRSPFT

SEQ ID NO: 10282 - protein, 9 aa, Homo sapiens
  Light chain CDR3
QQYGSSPFT

SEQ ID NO: 10283 - protein, 9 aa, Homo sapiens
  Light chain CDR3
QQYGSSPFT

SEQ ID NO: 10284 - protein, 9 aa, Homo sapiens
  Light chain CDR3
QQYGSSPFT

SEQ ID NO: 10285 - protein, 9 aa, Homo sapiens
  Light chain CDR3
QQYGSSPWT

SEQ ID NO: 10286 - protein, 9 aa, Homo sapiens
  Light chain CDR3
QQFGSSPFT

SEQ ID NO: 10287 - protein, 9 aa, Homo sapiens
  Light chain CDR3
QQYGSSPFT

SEQ ID NO: 10288 - protein, 9 aa, Homo sapiens
  Light chain CDR3
QQSYSTPLT

SEQ ID NO: 10289 - protein, 9 aa, Homo sapiens
  Light chain CDR3
QQYGSSPFT

SEQ ID NO: 10290 - protein, 9 aa, Homo sapiens
  Light chain CDR3
QQYNSYPYT

SEQ ID NO: 10291 - protein, 9 aa, Homo sapiens
  Light chain CDR3
QQYGTSPWT

SEQ ID NO: 10292 - protein, 9 aa, Homo sapiens
  Light chain CDR3
HQDYNLPYT

SEQ ID NO: 10293 - protein, 9 aa, Homo sapiens
  Light chain CDR3
QQYGSSPWT

SEQ ID NO: 10294 - protein, 9 aa, Homo sapiens
  Light chain CDR3
QQYGSSPFT

SEQ ID NO: 10295 - protein, 9 aa, Homo sapiens
  Light chain CDR3
QQYGSSPFT

SEQ ID NO: 10296 - protein, 9 aa, Homo sapiens
  Light chain CDR3
QQSYSTPLT

SEQ ID NO: 10297 - protein, 9 aa, Homo sapiens
  Light chain CDR3
QQYGISPFT

SEQ ID NO: 10298 - protein, 9 aa, Homo sapiens
  Light chain CDR3
QHYGSSPWT

SEQ ID NO: 10299 - protein, 9 aa, Homo sapiens
  Light chain CDR3
HQYYSTPYT

SEQ ID NO: 10300 - protein, 9 aa, Homo sapiens
  Light chain CDR3
QQDYNLPYT

SEQ ID NO: 10301 - protein, 9 aa, Homo sapiens
  Light chain CDR3
QQYCSTPYT

SEQ ID NO: 10302 - protein, 8 aa, Homo sapiens
  Light chain CDR3
HQSSSLPT

SEQ ID NO: 10303 - protein, 9 aa, Homo sapiens
  Light chain CDR3
MQALQTPIT

SEQ ID NO: 10304 - protein, 8 aa, Homo sapiens
  Light chain CDR3
MQSLQTIT

SEQ ID NO: 10305 - protein, 9 aa, Homo sapiens
  Light chain CDR3
QQYGSSPWT

SEQ ID NO: 10306 - protein, 9 aa, Homo sapiens
  Light chain CDR3
QKYNSAPWT

SEQ ID NO: 10307 - protein, 9 aa, Homo sapiens
  Light chain CDR3
QQYGSSPFT

SEQ ID NO: 10308 - protein, 9 aa, Homo sapiens
  Light chain CDR3
QHVYHLPWT

SEQ ID NO: 10309 - protein, 9 aa, Homo sapiens
  Light chain CDR3
QQYGSSPFT

SEQ ID NO: 10310 - protein, 9 aa, Homo sapiens
  Light chain CDR3
QQYGSSPFT

SEQ ID NO: 10311 - protein, 9 aa, Homo sapiens
  Light chain CDR3
QQYGSSPWT

SEQ ID NO: 10312 - protein, 9 aa, Homo sapiens
  Light chain CDR3
QQDYNLPLT

SEQ ID NO: 10313 - protein, 9 aa, Homo sapiens
  Light chain CDR3
QQYGSSPFT

SEQ ID NO: 10314 - protein, 9 aa, Homo sapiens
  Light chain CDR3
QQYGSSPFT

SEQ ID NO: 10315 - protein, 9 aa, Homo sapiens
  Light chain CDR3
QQAYNLPYT

SEQ ID NO: 10316 - protein, 9 aa, Homo sapiens
  Light chain CDR3
QQSYSTPLT

SEQ ID NO: 10317 - protein, 9 aa, Homo sapiens
  Light chain CDR3
QQYGSSPFT

SEQ ID NO: 10318 - protein, 9 aa, Homo sapiens
  Light chain CDR3
QQDYNLPFT

SEQ ID NO: 10319 - protein, 9 aa, Homo sapiens
  Light chain CDR3
QQYGSSPFT

SEQ ID NO: 10320 - protein, 9 aa, Homo sapiens
  Light chain CDR3
QQYGSSPFT

SEQ ID NO: 10321 - protein, 9 aa, Homo sapiens
  Light chain CDR3
LQHNSYPFT

SEQ ID NO: 10322 - protein, 9 aa, Homo sapiens
  Light chain CDR3
QQYGSSPFT

SEQ ID NO: 10323 - protein, 9 aa, Homo sapiens
  Light chain CDR3
QQYGISPFT

SEQ ID NO: 10324 - protein, 9 aa, Homo sapiens
  Light chain CDR3
QQYGTSPWT

SEQ ID NO: 10325 - protein, 9 aa, Homo sapiens
  Light chain CDR3
QQYGISPFT

SEQ ID NO: 10326 - protein, 9 aa, Homo sapiens
  Light chain CDR3
QQYGSSPFT

SEQ ID NO: 10327 - protein, 9 aa, Homo sapiens
  Light chain CDR3
QQDYKLPYT

SEQ ID NO: 10328 - protein, 9 aa, Homo sapiens
  Light chain CDR3
QQYGSSLWT

SEQ ID NO: 10329 - protein, 9 aa, Homo sapiens
  Light chain CDR3
QQYGTSPFT

SEQ ID NO: 10330 - protein, 9 aa, Homo sapiens
  Light chain CDR3
QQYGRSPFT

SEQ ID NO: 10331 - protein, 9 aa, Homo sapiens
  Light chain CDR3
QQYGSSPWT

SEQ ID NO: 10332 - protein, 9 aa, Homo sapiens
  Light chain CDR3
QQDYNLPFT

SEQ ID NO: 10333 - protein, 9 aa, Homo sapiens
  Light chain CDR3
QQYGVSPFT

SEQ ID NO: 10334 - protein, 9 aa, Homo sapiens
  Light chain CDR3
QQYGISPFT

SEQ ID NO: 10335 - protein, 9 aa, Homo sapiens
  Light chain CDR3
QQYGISPFT

SEQ ID NO: 10336 - protein, 9 aa, Homo sapiens
  Light chain CDR3
QQYGSSPFT

SEQ ID NO: 10337 - protein, 9 aa, Homo sapiens
  Light chain CDR3
QQYGTSPFT

SEQ ID NO: 10338 - protein, 9 aa, Homo sapiens
  Light chain CDR3
QQYGSSPFT

SEQ ID NO: 10339 - protein, 9 aa, Homo sapiens
  Light chain CDR3
QQYGSSPFT

SEQ ID NO: 10340 - protein, 9 aa, Homo sapiens
  Light chain CDR3
QQYGSSPFT

SEQ ID NO: 10341 - protein, 9 aa, Homo sapiens
  Light chain CDR3
QHYGSSPWT

SEQ ID NO: 10342 - protein, 9 aa, Homo sapiens
  Light chain CDR3
QQYGSSPFT

SEQ ID NO: 10343 - protein, 9 aa, Homo sapiens
  Light chain CDR3
QQYGTSPFT

SEQ ID NO: 10344 - protein, 9 aa, Homo sapiens
  Light chain CDR3
QQYGSSPFT

SEQ ID NO: 10345 - protein, 9 aa, Homo sapiens
  Light chain CDR3
MQTLQTPPT

SEQ ID NO: 10346 - protein, 9 aa, Homo sapiens
  Light chain CDR3
QQYGSSPFT

SEQ ID NO: 10347 - protein, 9 aa, Homo sapiens
  Light chain CDR3
QQYGISPFT

SEQ ID NO: 10348 - protein, 9 aa, Homo sapiens
  Light chain CDR3
QQYGSSPFT

SEQ ID NO: 10349 - protein, 9 aa, Homo sapiens
  Light chain CDR3
QQYGISPFT

SEQ ID NO: 10350 - protein, 9 aa, Homo sapiens
  Light chain CDR3
QQYGTSPFT

SEQ ID NO: 10351 - protein, 9 aa, Homo sapiens
  Light chain CDR3
QQYGISPFT

SEQ ID NO: 10352 - protein, 9 aa, Homo sapiens
  Light chain CDR3
QQYGISPFT

SEQ ID NO: 10353 - protein, 9 aa, Homo sapiens
  Light chain CDR3
QQYGTSPFT

SEQ ID NO: 10354 - protein, 9 aa, Homo sapiens
  Light chain CDR3
QQYGISPFT

SEQ ID NO: 10355 - protein, 9 aa, Homo sapiens
  Light chain CDR3
QQYGSSPFT

SEQ ID NO: 10356 - protein, 9 aa, Homo sapiens
  Light chain CDR3
QQYGISPFT

SEQ ID NO: 10357 - protein, 9 aa, Homo sapiens
  Light chain CDR3
QQYGISPFT

SEQ ID NO: 10358 - protein, 9 aa, Homo sapiens
  Light chain CDR3
QQYGSSPFT

SEQ ID NO: 10359 - protein, 9 aa, Homo sapiens
  Light chain CDR3
QQYGRSPFT

SEQ ID NO: 10360 - protein, 9 aa, Homo sapiens
  Light chain CDR3
QQYGSSPFT

SEQ ID NO: 10361 - protein, 9 aa, Homo sapiens
  Light chain CDR3
QQYGSSPWT

SEQ ID NO: 10362 - protein, 9 aa, Homo sapiens
  Light chain CDR3
HQSSSLPFT

SEQ ID NO: 10363 - protein, 9 aa, Homo sapiens
  Light chain CDR3
QQYGSSPFT

SEQ ID NO: 10364 - protein, 9 aa, Homo sapiens
  Light chain CDR3
LQHNSYPLT

SEQ ID NO: 10365 - protein, 9 aa, Homo sapiens
  Light chain CDR3
QQYGSSPFT

SEQ ID NO: 10366 - protein, 9 aa, Homo sapiens
  Light chain CDR3
QQYGSSPFT

SEQ ID NO: 10367 - protein, 9 aa, Homo sapiens
  Light chain CDR3
QQYGSSPWT

SEQ ID NO: 10368 - protein, 9 aa, Homo sapiens
  Light chain CDR3
QQYGRSPWT

SEQ ID NO: 10369 - protein, 9 aa, Homo sapiens
  Light chain CDR3
LQHNSYPLT

SEQ ID NO: 10370 - protein, 9 aa, Homo sapiens
  Light chain CDR3
QQYGSSPWT

SEQ ID NO: 10371 - protein, 9 aa, Homo sapiens
  Light chain CDR3
QQYGSSPFT

SEQ ID NO: 10372 - protein, 9 aa, Homo sapiens
  Light chain CDR3
QQYGGSPWT

SEQ ID NO: 10373 - protein, 9 aa, Homo sapiens
  Light chain CDR3
QQYGSSPFT

SEQ ID NO: 10374 - protein, 9 aa, Homo sapiens
  Light chain CDR3
QQYGSSPWT

SEQ ID NO: 10375 - protein, 9 aa, Homo sapiens
  Light chain CDR3
QQYGSSPWT

SEQ ID NO: 10376 - protein, 9 aa, Homo sapiens
  Light chain CDR3
QQSYSTPFT

SEQ ID NO: 10377 - protein, 9 aa, Homo sapiens
  Light chain CDR3
MQGTHWPIT

SEQ ID NO: 10378 - protein, 9 aa, Homo sapiens
  Light chain CDR3
QQYGPSPWT

SEQ ID NO: 10379 - protein, 9 aa, Homo sapiens
  Light chain CDR3
QQYGSSPFT

SEQ ID NO: 10380 - protein, 9 aa, Homo sapiens
  Light chain CDR3
MQTLQTPLT

SEQ ID NO: 10381 - protein, 9 aa, Homo sapiens
  Light chain CDR3
QQYGTSPWT

SEQ ID NO: 10382 - protein, 9 aa, Homo sapiens
  Light chain CDR3
QQSYRTPFT

SEQ ID NO: 10383 - protein, 9 aa, Homo sapiens
  Light chain CDR3
QQYGSSPWT

SEQ ID NO: 10384 - protein, 9 aa, Homo sapiens
  Light chain CDR3
QKYNSAPFT

SEQ ID NO: 10385 - protein, 9 aa, Homo sapiens
  Light chain CDR3
QQSYSTPFT

SEQ ID NO: 10386 - protein, 9 aa, Homo sapiens
  Light chain CDR3
QHYGSSPFT

SEQ ID NO: 10387 - protein, 9 aa, Homo sapiens
  Light chain CDR3
QKYNSAPYT

SEQ ID NO: 10388 - protein, 9 aa, Homo sapiens
  Light chain CDR3
QQSYRTPFT

SEQ ID NO: 10389 - protein, 9 aa, Homo sapiens
  Light chain CDR3
QQYGRSPFT

SEQ ID NO: 10390 - protein, 9 aa, Homo sapiens
  Light chain CDR3
QQSYSTPFT

SEQ ID NO: 10391 - protein, 9 aa, Homo sapiens
  Light chain CDR3
QQYGSSPWT

SEQ ID NO: 10392 - protein, 9 aa, Homo sapiens
  Light chain CDR3
QQYGSSPWT

SEQ ID NO: 10393 - protein, 9 aa, Homo sapiens
  Light chain CDR3
QKYNSAPLT

SEQ ID NO: 10394 - protein, 9 aa, Homo sapiens
  Light chain CDR3
QQYGRSPFT

SEQ ID NO: 10395 - protein, 9 aa, Homo sapiens
  Light chain CDR3
QQDYNLPFT

SEQ ID NO: 10396 - protein, 9 aa, Homo sapiens
  Light chain CDR3
QQYGTSPFT

SEQ ID NO: 10397 - protein, 9 aa, Homo sapiens
  Light chain CDR3
QQYGTSPFT

SEQ ID NO: 10398 - protein, 9 aa, Homo sapiens
  Light chain CDR3
QQYGSSPWT

SEQ ID NO: 10399 - protein, 9 aa, Homo sapiens
  Light chain CDR3
QQYGSSPFT

SEQ ID NO: 10400 - protein, 9 aa, Homo sapiens
  Light chain CDR3
QQLNSYPPT

SEQ ID NO: 10401 - protein, 9 aa, Homo sapiens
  Light chain CDR3
QQYGSSPFT

SEQ ID NO: 10402 - protein, 9 aa, Homo sapiens
  Light chain CDR3
HQSSSLPFT

SEQ ID NO: 10403 - protein, 9 aa, Homo sapiens
  Light chain CDR3
QQSYSTPFT

SEQ ID NO: 10404 - protein, 9 aa, Homo sapiens
  Light chain CDR3
QVYNSAPYT

SEQ ID NO: 10405 - protein, 9 aa, Homo sapiens
  Light chain CDR3
QQGYNLPFT

SEQ ID NO: 10406 - protein, 9 aa, Homo sapiens
  Light chain CDR3
QQYGSSPFT

SEQ ID NO: 10407 - protein, 10 aa, Homo sapiens
  Light chain CDR3
QKYNSAPPLT

SEQ ID NO: 10408 - protein, 9 aa, Homo sapiens
  Light chain CDR3
QQVYNLPWT

SEQ ID NO: 10409 - protein, 9 aa, Homo sapiens
  Light chain CDR3
QQDYNLPFT

SEQ ID NO: 10410 - protein, 9 aa, Homo sapiens
  Light chain CDR3
QQYGRSPFT

SEQ ID NO: 10411 - protein, 9 aa, Homo sapiens
  Light chain CDR3
QQYGRSPFT

SEQ ID NO: 10412 - protein, 9 aa, Homo sapiens
  Light chain CDR3
QQYGSSPFT

SEQ ID NO: 10413 - protein, 9 aa, Homo sapiens
  Light chain CDR3
QQYGRSPFT

SEQ ID NO: 10414 - protein, 9 aa, Homo sapiens
  Light chain CDR3
QQYGTSPYT

SEQ ID NO: 10415 - protein, 9 aa, Homo sapiens
  Light chain CDR3
QQSYRTPFT

SEQ ID NO: 10416 - protein, 9 aa, Homo sapiens
  Light chain CDR3
QQYGSSPWT

SEQ ID NO: 10417 - protein, 9 aa, Homo sapiens
  Light chain CDR3
QQYGSSPWT

SEQ ID NO: 10418 - protein, 9 aa, Homo sapiens
  Light chain CDR3
QQYGSSPWT

SEQ ID NO: 10419 - protein, 9 aa, Homo sapiens
  Light chain CDR3
QQDYNLPFT

SEQ ID NO: 10420 - protein, 9 aa, Homo sapiens
  Light chain CDR3
QQYGSSPFT

SEQ ID NO: 10421 - protein, 9 aa, Homo sapiens
  Light chain CDR3
QQDYNLPFT

SEQ ID NO: 10422 - protein, 9 aa, Homo sapiens
  Light chain CDR3
QEYSSAPWT

SEQ ID NO: 10423 - protein, 9 aa, Homo sapiens
  Light chain CDR3
QQYGSSPWT

SEQ ID NO: 10424 - protein, 9 aa, Homo sapiens
  Light chain CDR3
QQVYNLPFT

SEQ ID NO: 10425 - protein, 9 aa, Homo sapiens
  Light chain CDR3
QKYGSSPFT

SEQ ID NO: 10426 - protein, 10 aa, Homo sapiens
  Light chain CDR3
QQRSNWPPYT

SEQ ID NO: 10427 - protein, 9 aa, Homo sapiens
  Light chain CDR3
QQYGSSPFT

SEQ ID NO: 10428 - protein, 9 aa, Homo sapiens
  Light chain CDR3
QQYGSSPFT

SEQ ID NO: 10429 - protein, 9 aa, Homo sapiens
  Light chain CDR3
QQYGSSPFT

SEQ ID NO: 10430 - protein, 9 aa, Homo sapiens
  Light chain CDR3
QQYGSSPFT

SEQ ID NO: 10431 - protein, 9 aa, Homo sapiens
  Light chain CDR3
QQYGSSPWT

SEQ ID NO: 10432 - protein, 9 aa, Homo sapiens
  Light chain CDR3
HQDYNLPYT

SEQ ID NO: 10433 - protein, 9 aa, Homo sapiens
  Light chain CDR3
QQYGSSPWT

SEQ ID NO: 10434 - protein, 9 aa, Homo sapiens
  Light chain CDR3
QQYGSSPFT

SEQ ID NO: 10435 - protein, 9 aa, Homo sapiens
  Light chain CDR3
QQYGRSPFT

SEQ ID NO: 10436 - protein, 9 aa, Homo sapiens
  Light chain CDR3
QQYGSSPWT

SEQ ID NO: 10437 - protein, 9 aa, Homo sapiens
  Light chain CDR3
QQYGSSPFT

SEQ ID NO: 10438 - protein, 9 aa, Homo sapiens
  Light chain CDR3
QNYNSAPWT

SEQ ID NO: 10439 - protein, 9 aa, Homo sapiens
  Light chain CDR3
QQYGRSPWT

SEQ ID NO: 10440 - protein, 9 aa, Homo sapiens
  Light chain CDR3
QHYGSSPFT

SEQ ID NO: 10441 - protein, 9 aa, Homo sapiens
  Light chain CDR3
MQTLQTPLT

SEQ ID NO: 10442 - protein, 9 aa, Homo sapiens
  Light chain CDR3
QQYGTSPFT

SEQ ID NO: 10443 - protein, 9 aa, Homo sapiens
  Light chain CDR3
QQYGRSPWT

SEQ ID NO: 10444 - protein, 10 aa, Homo sapiens
  Light chain CDR3
QQYGSSSMYT

SEQ ID NO: 10445 - protein, 10 aa, Homo sapiens
  Light chain CDR3
QQYGSSTMYT

SEQ ID NO: 10446 - protein, 9 aa, Homo sapiens
  Light chain CDR3
QKYNSAPYT

SEQ ID NO: 10447 - protein, 9 aa, Homo sapiens
  Light chain CDR3
QQYGTSPFT

SEQ ID NO: 10448 - protein, 9 aa, Homo sapiens
  Light chain CDR3
QQYGSSPWT

SEQ ID NO: 10449 - protein, 9 aa, Homo sapiens
  Light chain CDR3
QQYGSSPWT

SEQ ID NO: 10450 - protein, 9 aa, Homo sapiens
  Light chain CDR3
QQYGSSPWT

SEQ ID NO: 10451 - protein, 9 aa, Homo sapiens
  Light chain CDR3
QQYGSSPWT

SEQ ID NO: 10452 - protein, 9 aa, Homo sapiens
  Light chain CDR3
QQYGTSPWT

SEQ ID NO: 10453 - protein, 9 aa, Homo sapiens
  Light chain CDR3
QQYGSSPFT

SEQ ID NO: 10454 - protein, 9 aa, Homo sapiens
  Light chain CDR3
QQYGSSPWT

SEQ ID NO: 10455 - protein, 9 aa, Homo sapiens
  Light chain CDR3
QQYGSSPWT

SEQ ID NO: 10456 - protein, 9 aa, Homo sapiens
  Light chain CDR3
QHYGSSPFT

SEQ ID NO: 10457 - protein, 10 aa, Homo sapiens
  Light chain CDR3
QQRSNWPPYT

SEQ ID NO: 10458 - protein, 9 aa, Homo sapiens
  Light chain CDR3
QQYGSSPWT

SEQ ID NO: 10459 - protein, 9 aa, Homo sapiens
  Light chain CDR3
QQYGSSPFT

SEQ ID NO: 10460 - protein, 9 aa, Homo sapiens
  Light chain CDR3
QQYGSSPWT

SEQ ID NO: 10461 - protein, 9 aa, Homo sapiens
  Light chain CDR3
QQSYTTPLT

SEQ ID NO: 10462 - protein, 9 aa, Homo sapiens
  Light chain CDR3
QQYGSSPWT

SEQ ID NO: 10463 - protein, 9 aa, Homo sapiens
  Light chain CDR3
QQYGTSPWT

SEQ ID NO: 10464 - protein, 9 aa, Homo sapiens
  Light chain CDR3
QQYGRSPFT

SEQ ID NO: 10465 - protein, 9 aa, Homo sapiens
  Light chain CDR3
QQYGNSPWT

SEQ ID NO: 10466 - protein, 9 aa, Homo sapiens
  Light chain CDR3
QQYGSSPWT

SEQ ID NO: 10467 - protein, 9 aa, Homo sapiens
  Light chain CDR3
QQYGSSPWT

SEQ ID NO: 10468 - protein, 9 aa, Homo sapiens
  Light chain CDR3
QQYGTSPFT

SEQ ID NO: 10469 - protein, 9 aa, Homo sapiens
  Light chain CDR3
QQYGSSPFT

SEQ ID NO: 10470 - protein, 9 aa, Homo sapiens
  Light chain CDR3
QHYGSSPFT

SEQ ID NO: 10471 - protein, 9 aa, Homo sapiens
  Light chain CDR3
QQDYNLPLT

SEQ ID NO: 10472 - protein, 9 aa, Homo sapiens
  Light chain CDR3
QQYGRSPFT

SEQ ID NO: 10473 - protein, 9 aa, Homo sapiens
  Light chain CDR3
QQYGRSPFT

SEQ ID NO: 10474 - protein, 9 aa, Homo sapiens
  Light chain CDR3
QQYGSSPWT

SEQ ID NO: 10475 - protein, 9 aa, Homo sapiens
  Light chain CDR3
QQYGRSPFT

SEQ ID NO: 10476 - protein, 9 aa, Homo sapiens
  Light chain CDR3
QHYGSSPWT

SEQ ID NO: 10477 - protein, 9 aa, Homo sapiens
  Light chain CDR3
QQYGTSPFT

SEQ ID NO: 10478 - protein, 9 aa, Homo sapiens
  Light chain CDR3
QQYGRSPFT

SEQ ID NO: 10479 - protein, 9 aa, Homo sapiens
  Light chain CDR3
QQYGRSPWT

SEQ ID NO: 10480 - protein, 8 aa, Homo sapiens
  Heavy chain CDR1
GGSISSYY

SEQ ID NO: 10481 - protein, 10 aa, Homo sapiens
  Heavy chain CDR1
GGSISSSSYY

SEQ ID NO: 10482 - protein, 10 aa, Homo sapiens
  Heavy chain CDR1
GGSISSSSYY

SEQ ID NO: 10483 - protein, 10 aa, Homo sapiens
  Heavy chain CDR1
GGSISSSSYY

SEQ ID NO: 10484 - protein, 8 aa, Homo sapiens
  Heavy chain CDR1
GFTFSDYY

SEQ ID NO: 10485 - protein, 10 aa, Homo sapiens
  Heavy chain CDR1
GGSISSSSYY

SEQ ID NO: 10486 - protein, 10 aa, Homo sapiens
  Heavy chain CDR1
GGSISSSSYY

SEQ ID NO: 10487 - protein, 8 aa, Homo sapiens
  Heavy chain CDR1
GGSISSYY

SEQ ID NO: 10488 - protein, 8 aa, Homo sapiens
  Heavy chain CDR1
GFTFSNAW

SEQ ID NO: 10489 - protein, 8 aa, Homo sapiens
  Heavy chain CDR1
GYTFTSYG

SEQ ID NO: 10490 - protein, 10 aa, Homo sapiens
  Heavy chain CDR1
GGSISSSSYY

SEQ ID NO: 10491 - protein, 8 aa, Homo sapiens
  Heavy chain CDR1
GFTFDDYG

SEQ ID NO: 10492 - protein, 10 aa, Homo sapiens
  Heavy chain CDR1
GGSISSSSYY

SEQ ID NO: 10493 - protein, 8 aa, Homo sapiens
  Heavy chain CDR1
GFTFDDYG

SEQ ID NO: 10494 - protein, 10 aa, Homo sapiens
  Heavy chain CDR1
GGSISSSSYY

SEQ ID NO: 10495 - protein, 10 aa, Homo sapiens
  Heavy chain CDR1
GGSISSSSYY

SEQ ID NO: 10496 - protein, 8 aa, Homo sapiens
  Heavy chain CDR1
GFTFSSYG

SEQ ID NO: 10497 - protein, 8 aa, Homo sapiens
  Heavy chain CDR1
GFTFSNAW

SEQ ID NO: 10498 - protein, 10 aa, Homo sapiens
  Heavy chain CDR1
GGSISSSSYY

SEQ ID NO: 10499 - protein, 8 aa, Homo sapiens
  Heavy chain CDR1
GGSISSYY

SEQ ID NO: 10500 - protein, 8 aa, Homo sapiens
  Heavy chain CDR1
GGSISSYY

SEQ ID NO: 10501 - protein, 8 aa, Homo sapiens
  Heavy chain CDR1
GYTFTSYG

SEQ ID NO: 10502 - protein, 8 aa, Homo sapiens
  Heavy chain CDR1
GFTFSNAW

SEQ ID NO: 10503 - protein, 8 aa, Homo sapiens
  Heavy chain CDR1
GGSISSYY

SEQ ID NO: 10504 - protein, 8 aa, Homo sapiens
  Heavy chain CDR1
GYTFTSYG

SEQ ID NO: 10505 - protein, 8 aa, Homo sapiens
  Heavy chain CDR1
GGSISSYY

SEQ ID NO: 10506 - protein, 8 aa, Homo sapiens
  Heavy chain CDR1
GFTFDDYG

SEQ ID NO: 10507 - protein, 8 aa, Homo sapiens
  Heavy chain CDR1
GFTFSSYG

SEQ ID NO: 10508 - protein, 8 aa, Homo sapiens
  Heavy chain CDR1
GFTFDDYG

SEQ ID NO: 10509 - protein, 8 aa, Homo sapiens
  Heavy chain CDR1
GGSISSYY

SEQ ID NO: 10510 - protein, 8 aa, Homo sapiens
  Heavy chain CDR1
GGSISSYY

SEQ ID NO: 10511 - protein, 8 aa, Homo sapiens
  Heavy chain CDR1
GYTFTSYG

SEQ ID NO: 10512 - protein, 8 aa, Homo sapiens
  Heavy chain CDR1
GGSISSYY

SEQ ID NO: 10513 - protein, 8 aa, Homo sapiens
  Heavy chain CDR1
GGSISSYY

SEQ ID NO: 10514 - protein, 8 aa, Homo sapiens
  Heavy chain CDR1
GFTFNNYG

SEQ ID NO: 10515 - protein, 8 aa, Homo sapiens
  Heavy chain CDR1
GYTFTSYG

SEQ ID NO: 10516 - protein, 10 aa, Homo sapiens
  Heavy chain CDR1
GGSISSSSYY

SEQ ID NO: 10517 - protein, 8 aa, Homo sapiens
  Heavy chain CDR1
GGSISSYY

SEQ ID NO: 10518 - protein, 8 aa, Homo sapiens
  Heavy chain CDR1
GFTFSNAW

SEQ ID NO: 10519 - protein, 8 aa, Homo sapiens
  Heavy chain CDR1
GFTFDDYG

SEQ ID NO: 10520 - protein, 10 aa, Homo sapiens
  Heavy chain CDR1
GGSISSSSYY

SEQ ID NO: 10521 - protein, 10 aa, Homo sapiens
  Heavy chain CDR1
GGSISSSSYY

SEQ ID NO: 10522 - protein, 8 aa, Homo sapiens
  Heavy chain CDR1
GGSISSYY

SEQ ID NO: 10523 - protein, 10 aa, Homo sapiens
  Heavy chain CDR1
GGSISSSSYY

SEQ ID NO: 10524 - protein, 8 aa, Homo sapiens
  Heavy chain CDR1
GFTFDDYG

SEQ ID NO: 10525 - protein, 8 aa, Homo sapiens
  Heavy chain CDR1
GFTFDDYG

SEQ ID NO: 10526 - protein, 8 aa, Homo sapiens
  Heavy chain CDR1
GFTFSSYG

SEQ ID NO: 10527 - protein, 8 aa, Homo sapiens
  Heavy chain CDR1
GFTFNSYG

SEQ ID NO: 10528 - protein, 8 aa, Homo sapiens
  Heavy chain CDR1
GFTFSSYG

SEQ ID NO: 10529 - protein, 8 aa, Homo sapiens
  Heavy chain CDR1
GFTLSSYG

SEQ ID NO: 10530 - protein, 10 aa, Homo sapiens
  Heavy chain CDR1
GGSISSNSYY

SEQ ID NO: 10531 - protein, 8 aa, Homo sapiens
  Heavy chain CDR1
GFTFSTYG

SEQ ID NO: 10532 - protein, 8 aa, Homo sapiens
  Heavy chain CDR1
GFTFSSHG

SEQ ID NO: 10533 - protein, 8 aa, Homo sapiens
  Heavy chain CDR1
GFTFSSYG

SEQ ID NO: 10534 - protein, 8 aa, Homo sapiens
  Heavy chain CDR1
GFTFNSYG

SEQ ID NO: 10535 - protein, 8 aa, Homo sapiens
  Heavy chain CDR1
GFTLSRYG

SEQ ID NO: 10536 - protein, 8 aa, Homo sapiens
  Heavy chain CDR1
GFTFRSFG

SEQ ID NO: 10537 - protein, 8 aa, Homo sapiens
  Heavy chain CDR1
GFTFSSYG

SEQ ID NO: 10538 - protein, 8 aa, Homo sapiens
  Heavy chain CDR1
GFTFSRYG

SEQ ID NO: 10539 - protein, 8 aa, Homo sapiens
  Heavy chain CDR1
GFTFSTYG

SEQ ID NO: 10540 - protein, 8 aa, Homo sapiens
  Heavy chain CDR1
GFTFSSYG

SEQ ID NO: 10541 - protein, 8 aa, Homo sapiens
  Heavy chain CDR1
GFTFSSYG

SEQ ID NO: 10542 - protein, 8 aa, Homo sapiens
  Heavy chain CDR1
GFTFSSYG

SEQ ID NO: 10543 - protein, 8 aa, Homo sapiens
  Heavy chain CDR1
GFTFSRFG

SEQ ID NO: 10544 - protein, 8 aa, Homo sapiens
  Heavy chain CDR1
GFTLSRYG

SEQ ID NO: 10545 - protein, 8 aa, Homo sapiens
  Heavy chain CDR1
GFTFSSYG

SEQ ID NO: 10546 - protein, 8 aa, Homo sapiens
  Heavy chain CDR1
GFTFSNYC

SEQ ID NO: 10547 - protein, 8 aa, Homo sapiens
  Heavy chain CDR1
GFTFSSYG

SEQ ID NO: 10548 - protein, 8 aa, Homo sapiens
  Heavy chain CDR1
GFTFNSYG

SEQ ID NO: 10549 - protein, 8 aa, Homo sapiens
  Heavy chain CDR1
GFTFNSYG

SEQ ID NO: 10550 - protein, 8 aa, Homo sapiens
  Heavy chain CDR1
GFTLSSYG

SEQ ID NO: 10551 - protein, 8 aa, Homo sapiens
  Heavy chain CDR1
GFTFNSYG

SEQ ID NO: 10552 - protein, 8 aa, Homo sapiens
  Heavy chain CDR1
GFTFSSYG

SEQ ID NO: 10553 - protein, 8 aa, Homo sapiens
  Heavy chain CDR1
GFTFSRFG

SEQ ID NO: 10554 - protein, 8 aa, Homo sapiens
  Heavy chain CDR1
GFTLSSYG

SEQ ID NO: 10555 - protein, 8 aa, Homo sapiens
  Heavy chain CDR1
GFTFSSYG

SEQ ID NO: 10556 - protein, 8 aa, Homo sapiens
  Heavy chain CDR1
GFTFSSYG

SEQ ID NO: 10557 - protein, 8 aa, Homo sapiens
  Heavy chain CDR1
GFTFRSFG

SEQ ID NO: 10558 - protein, 8 aa, Homo sapiens
  Heavy chain CDR1
GFTFNSYG

SEQ ID NO: 10559 - protein, 8 aa, Homo sapiens
  Heavy chain CDR1
GFTFSSYG

SEQ ID NO: 10560 - protein, 8 aa, Homo sapiens
  Heavy chain CDR1
GFTFSSYG

SEQ ID NO: 10561 - protein, 8 aa, Homo sapiens
  Heavy chain CDR1
GFTFSSYG

SEQ ID NO: 10562 - protein, 8 aa, Homo sapiens
  Heavy chain CDR1
GFTFSSYG

SEQ ID NO: 10563 - protein, 8 aa, Homo sapiens
  Heavy chain CDR1
GITFSSYG

SEQ ID NO: 10564 - protein, 8 aa, Homo sapiens
  Heavy chain CDR1
GFTFSSYG

SEQ ID NO: 10565 - protein, 8 aa, Homo sapiens
  Heavy chain CDR1
GFTFSSYG

SEQ ID NO: 10566 - protein, 8 aa, Homo sapiens
  Heavy chain CDR1
GFTFSSYG

SEQ ID NO: 10567 - protein, 10 aa, Homo sapiens
  Heavy chain CDR1
GGSISSSSYY

SEQ ID NO: 10568 - protein, 10 aa, Homo sapiens
  Heavy chain CDR1
GGSISSSSYY

SEQ ID NO: 10569 - protein, 8 aa, Homo sapiens
  Heavy chain CDR1
GITFSSYG

SEQ ID NO: 10570 - protein, 8 aa, Homo sapiens
  Heavy chain CDR1
GVTLSSYG

SEQ ID NO: 10571 - protein, 8 aa, Homo sapiens
  Heavy chain CDR1
GFTFSSYG

SEQ ID NO: 10572 - protein, 10 aa, Homo sapiens
  Heavy chain CDR1
GGSISSSSYY

SEQ ID NO: 10573 - protein, 8 aa, Homo sapiens
  Heavy chain CDR1
GFTFSSYG

SEQ ID NO: 10574 - protein, 8 aa, Homo sapiens
  Heavy chain CDR1
GFTFSSYG

SEQ ID NO: 10575 - protein, 10 aa, Homo sapiens
  Heavy chain CDR1
GGSISSSSYY

SEQ ID NO: 10576 - protein, 8 aa, Homo sapiens
  Heavy chain CDR1
GFTFSSYG

SEQ ID NO: 10577 - protein, 8 aa, Homo sapiens
  Heavy chain CDR1
GFTFSSYG

SEQ ID NO: 10578 - protein, 10 aa, Homo sapiens
  Heavy chain CDR1
GGSISSSSYY

SEQ ID NO: 10579 - protein, 8 aa, Homo sapiens
  Heavy chain CDR1
GITFSSYG

SEQ ID NO: 10580 - protein, 8 aa, Homo sapiens
  Heavy chain CDR1
GFTFSSYG

SEQ ID NO: 10581 - protein, 8 aa, Homo sapiens
  Heavy chain CDR1
GFTFSSYG

SEQ ID NO: 10582 - protein, 8 aa, Homo sapiens
  Heavy chain CDR1
GFTFSSYN

SEQ ID NO: 10583 - protein, 10 aa, Homo sapiens
  Heavy chain CDR1
GGSISSSSYY

SEQ ID NO: 10584 - protein, 10 aa, Homo sapiens
  Heavy chain CDR1
GGSISSSSYY

SEQ ID NO: 10585 - protein, 8 aa, Homo sapiens
  Heavy chain CDR1
GFTFSSYG

SEQ ID NO: 10586 - protein, 8 aa, Homo sapiens
  Heavy chain CDR1
GFTFGDYV

SEQ ID NO: 10587 - protein, 8 aa, Homo sapiens
  Heavy chain CDR1
GGSISSYY

SEQ ID NO: 10588 - protein, 10 aa, Homo sapiens
  Heavy chain CDR1
GGSISSSSYY

SEQ ID NO: 10589 - protein, 10 aa, Homo sapiens
  Heavy chain CDR1
GGSISSSSYY

SEQ ID NO: 10590 - protein, 8 aa, Homo sapiens
  Heavy chain CDR1
GFTFSSYG

SEQ ID NO: 10591 - protein, 10 aa, Homo sapiens
  Heavy chain CDR1
GGSISSSSYY

SEQ ID NO: 10592 - protein, 10 aa, Homo sapiens
  Heavy chain CDR1
GGSISSSSYY

SEQ ID NO: 10593 - protein, 8 aa, Homo sapiens
  Heavy chain CDR1
GFTFSSYG

SEQ ID NO: 10594 - protein, 8 aa, Homo sapiens
  Heavy chain CDR1
GFTFSSYG

SEQ ID NO: 10595 - protein, 8 aa, Homo sapiens
  Heavy chain CDR1
GFTFSSYG

SEQ ID NO: 10596 - protein, 8 aa, Homo sapiens
  Heavy chain CDR1
GFTFSSYG

SEQ ID NO: 10597 - protein, 8 aa, Homo sapiens
  Heavy chain CDR1
GFTFSSYG

SEQ ID NO: 10598 - protein, 10 aa, Homo sapiens
  Heavy chain CDR1
GGSISSSSYY

SEQ ID NO: 10599 - protein, 8 aa, Homo sapiens
  Heavy chain CDR1
GFTFSSYG

SEQ ID NO: 10600 - protein, 8 aa, Homo sapiens
  Heavy chain CDR1
GFTFSSYG

SEQ ID NO: 10601 - protein, 8 aa, Homo sapiens
  Heavy chain CDR1
GFTFSSYG

SEQ ID NO: 10602 - protein, 10 aa, Homo sapiens
  Heavy chain CDR1
GGSISSSSYY

SEQ ID NO: 10603 - protein, 8 aa, Homo sapiens
  Heavy chain CDR1
GFTFSSYG

SEQ ID NO: 10604 - protein, 8 aa, Homo sapiens
  Heavy chain CDR1
GFTFSSYG

SEQ ID NO: 10605 - protein, 10 aa, Homo sapiens
  Heavy chain CDR1
GGSISSSSYY

SEQ ID NO: 10606 - protein, 10 aa, Homo sapiens
  Heavy chain CDR1
GGSISSSSYY

SEQ ID NO: 10607 - protein, 8 aa, Homo sapiens
  Heavy chain CDR1
GFTFSSYG

SEQ ID NO: 10608 - protein, 10 aa, Homo sapiens
  Heavy chain CDR1
GGSISSSSYY

SEQ ID NO: 10609 - protein, 8 aa, Homo sapiens
  Heavy chain CDR1
GFTFSSYG

SEQ ID NO: 10610 - protein, 8 aa, Homo sapiens
  Heavy chain CDR1
GFTFSSYG

SEQ ID NO: 10611 - protein, 8 aa, Homo sapiens
  Heavy chain CDR1
GFTFSSYG

SEQ ID NO: 10612 - protein, 8 aa, Homo sapiens
  Heavy chain CDR1
GFTFDDYG

SEQ ID NO: 10613 - protein, 8 aa, Homo sapiens
  Heavy chain CDR1
GFTFDDYG

SEQ ID NO: 10614 - protein, 8 aa, Homo sapiens
  Heavy chain CDR1
GYTFTSYG

SEQ ID NO: 10615 - protein, 8 aa, Homo sapiens
  Heavy chain CDR1
GFAFDDFG

SEQ ID NO: 10616 - protein, 8 aa, Homo sapiens
  Heavy chain CDR1
GYTFTSYG

SEQ ID NO: 10617 - protein, 8 aa, Homo sapiens
  Heavy chain CDR1
GYTFTSYG

SEQ ID NO: 10618 - protein, 8 aa, Homo sapiens
  Heavy chain CDR1
GFTFSSHG

SEQ ID NO: 10619 - protein, 8 aa, Homo sapiens
  Heavy chain CDR1
GFTFSSYG

SEQ ID NO: 10620 - protein, 8 aa, Homo sapiens
  Heavy chain CDR1
GYTFTSYY

SEQ ID NO: 10621 - protein, 8 aa, Homo sapiens
  Heavy chain CDR1
GFTFRGYG

SEQ ID NO: 10622 - protein, 8 aa, Homo sapiens
  Heavy chain CDR1
GFTFSSYG

SEQ ID NO: 10623 - protein, 8 aa, Homo sapiens
  Heavy chain CDR1
GYTFTSYY

SEQ ID NO: 10624 - protein, 8 aa, Homo sapiens
  Heavy chain CDR1
GFTFSSYG

SEQ ID NO: 10625 - protein, 8 aa, Homo sapiens
  Heavy chain CDR1
GFTFSSYG

SEQ ID NO: 10626 - protein, 8 aa, Homo sapiens
  Heavy chain CDR1
GFTFNSYG

SEQ ID NO: 10627 - protein, 8 aa, Homo sapiens
  Heavy chain CDR1
GFTFSNYG

SEQ ID NO: 10628 - protein, 8 aa, Homo sapiens
  Heavy chain CDR1
GYTFTNYG

SEQ ID NO: 10629 - protein, 8 aa, Homo sapiens
  Heavy chain CDR1
GFTFSSYG

SEQ ID NO: 10630 - protein, 8 aa, Homo sapiens
  Heavy chain CDR1
GYTFTSYG

SEQ ID NO: 10631 - protein, 8 aa, Homo sapiens
  Heavy chain CDR1
GYTFTNYG

SEQ ID NO: 10632 - protein, 8 aa, Homo sapiens
  Heavy chain CDR1
GFTFSSYG

SEQ ID NO: 10633 - protein, 8 aa, Homo sapiens
  Heavy chain CDR1
GFSFDDFG

SEQ ID NO: 10634 - protein, 8 aa, Homo sapiens
  Heavy chain CDR1
GFTFDDYG

SEQ ID NO: 10635 - protein, 8 aa, Homo sapiens
  Heavy chain CDR1
GFTFSYAW

SEQ ID NO: 10636 - protein, 8 aa, Homo sapiens
  Heavy chain CDR1
GFTFRGYG

SEQ ID NO: 10637 - protein, 8 aa, Homo sapiens
  Heavy chain CDR1
GFTFSSYG

SEQ ID NO: 10638 - protein, 8 aa, Homo sapiens
  Heavy chain CDR1
GFTFRGYG

SEQ ID NO: 10639 - protein, 8 aa, Homo sapiens
  Heavy chain CDR1
GFSFDDYG

SEQ ID NO: 10640 - protein, 8 aa, Homo sapiens
  Heavy chain CDR1
GFTFRGYG

SEQ ID NO: 10641 - protein, 8 aa, Homo sapiens
  Heavy chain CDR1
GFTFSSFG

SEQ ID NO: 10642 - protein, 8 aa, Homo sapiens
  Heavy chain CDR1
GFTFRGYG

SEQ ID NO: 10643 - protein, 8 aa, Homo sapiens
  Heavy chain CDR1
GFTFSSYG

SEQ ID NO: 10644 - protein, 8 aa, Homo sapiens
  Heavy chain CDR1
GFMFSSYG

SEQ ID NO: 10645 - protein, 8 aa, Homo sapiens
  Heavy chain CDR1
GFTFSSYG

SEQ ID NO: 10646 - protein, 8 aa, Homo sapiens
  Heavy chain CDR1
GFTFSSYG

SEQ ID NO: 10647 - protein, 8 aa, Homo sapiens
  Heavy chain CDR1
GFTFSSYG

SEQ ID NO: 10648 - protein, 8 aa, Homo sapiens
  Heavy chain CDR1
GFTFDDYG

SEQ ID NO: 10649 - protein, 8 aa, Homo sapiens
  Heavy chain CDR1
GYTFTSYG

SEQ ID NO: 10650 - protein, 8 aa, Homo sapiens
  Heavy chain CDR1
GFTFDDYG

SEQ ID NO: 10651 - protein, 8 aa, Homo sapiens
  Heavy chain CDR1
GFTFSSYG

SEQ ID NO: 10652 - protein, 8 aa, Homo sapiens
  Heavy chain CDR1
GFTFSSYG

SEQ ID NO: 10653 - protein, 8 aa, Homo sapiens
  Heavy chain CDR1
GYTFTSYG

SEQ ID NO: 10654 - protein, 8 aa, Homo sapiens
  Heavy chain CDR1
GFTFSSYG

SEQ ID NO: 10655 - protein, 8 aa, Homo sapiens
  Heavy chain CDR1
GFTFSSYG

SEQ ID NO: 10656 - protein, 8 aa, Homo sapiens
  Heavy chain CDR1
GFTFADYG

SEQ ID NO: 10657 - protein, 8 aa, Homo sapiens
  Heavy chain CDR1
GFTLSSYG

SEQ ID NO: 10658 - protein, 8 aa, Homo sapiens
  Heavy chain CDR1
GFTFSSYG

SEQ ID NO: 10659 - protein, 8 aa, Homo sapiens
  Heavy chain CDR1
GFTFSSYG

SEQ ID NO: 10660 - protein, 8 aa, Homo sapiens
  Heavy chain CDR1
GFTFDDYG

SEQ ID NO: 10661 - protein, 8 aa, Homo sapiens
  Heavy chain CDR1
GFTFDDYG

SEQ ID NO: 10662 - protein, 8 aa, Homo sapiens
  Heavy chain CDR1
GFTFSNHG

SEQ ID NO: 10663 - protein, 8 aa, Homo sapiens
  Heavy chain CDR1
GYTFTSYG

SEQ ID NO: 10664 - protein, 8 aa, Homo sapiens
  Heavy chain CDR1
GFTFSYAW

SEQ ID NO: 10665 - protein, 8 aa, Homo sapiens
  Heavy chain CDR1
GYTFTSYY

SEQ ID NO: 10666 - protein, 8 aa, Homo sapiens
  Heavy chain CDR1
GYTFTSYY

SEQ ID NO: 10667 - protein, 8 aa, Homo sapiens
  Heavy chain CDR1
GYTFTSYG

SEQ ID NO: 10668 - protein, 8 aa, Homo sapiens
  Heavy chain CDR1
GFTFSSYG

SEQ ID NO: 10669 - protein, 8 aa, Homo sapiens
  Heavy chain CDR1
GFTFSSYG

SEQ ID NO: 10670 - protein, 8 aa, Homo sapiens
  Heavy chain CDR1
GFAFDDFG

SEQ ID NO: 10671 - protein, 8 aa, Homo sapiens
  Heavy chain CDR1
GYTFTSYY

SEQ ID NO: 10672 - protein, 8 aa, Homo sapiens
  Heavy chain CDR1
GFTFDDYG

SEQ ID NO: 10673 - protein, 8 aa, Homo sapiens
  Heavy chain CDR1
GYTFTSYG

SEQ ID NO: 10674 - protein, 8 aa, Homo sapiens
  Heavy chain CDR1
GFTFTSYY

SEQ ID NO: 10675 - protein, 8 aa, Homo sapiens
  Heavy chain CDR1
GFTFRGYG

SEQ ID NO: 10676 - protein, 8 aa, Homo sapiens
  Heavy chain CDR1
GFTFSSYG

SEQ ID NO: 10677 - protein, 8 aa, Homo sapiens
  Heavy chain CDR1
GFTFSSYG

SEQ ID NO: 10678 - protein, 8 aa, Homo sapiens
  Heavy chain CDR1
GFTFDDYG

SEQ ID NO: 10679 - protein, 8 aa, Homo sapiens
  Heavy chain CDR1
GFAFDDFG

SEQ ID NO: 10680 - protein, 8 aa, Homo sapiens
  Heavy chain CDR1
GFMFSSYG

SEQ ID NO: 10681 - protein, 8 aa, Homo sapiens
  Heavy chain CDR1
GFTLSSHG

SEQ ID NO: 10682 - protein, 8 aa, Homo sapiens
  Heavy chain CDR1
GFTFDDYG

SEQ ID NO: 10683 - protein, 8 aa, Homo sapiens
  Heavy chain CDR1
GFTFSSHG

SEQ ID NO: 10684 - protein, 8 aa, Homo sapiens
  Heavy chain CDR1
GYTFTSYY

SEQ ID NO: 10685 - protein, 8 aa, Homo sapiens
  Heavy chain CDR1
GFTFSSYG

SEQ ID NO: 10686 - protein, 8 aa, Homo sapiens
  Heavy chain CDR1
GFTFSSHG

SEQ ID NO: 10687 - protein, 8 aa, Homo sapiens
  Heavy chain CDR1
GFTFSSYG

SEQ ID NO: 10688 - protein, 8 aa, Homo sapiens
  Heavy chain CDR1
GYTFTNYG

SEQ ID NO: 10689 - protein, 8 aa, Homo sapiens
  Heavy chain CDR1
GFAFDDFG

SEQ ID NO: 10690 - protein, 8 aa, Homo sapiens
  Heavy chain CDR1
GYTFTSYG

SEQ ID NO: 10691 - protein, 8 aa, Homo sapiens
  Heavy chain CDR1
GFTFSSYG

SEQ ID NO: 10692 - protein, 8 aa, Homo sapiens
  Heavy chain CDR1
GFIFSSYG

SEQ ID NO: 10693 - protein, 8 aa, Homo sapiens
  Heavy chain CDR1
GFIFEDYG

SEQ ID NO: 10694 - protein, 8 aa, Homo sapiens
  Heavy chain CDR1
GFTFDDYG

SEQ ID NO: 10695 - protein, 8 aa, Homo sapiens
  Heavy chain CDR1
GYTFTSYY

SEQ ID NO: 10696 - protein, 8 aa, Homo sapiens
  Heavy chain CDR1
GFTFSSYG

SEQ ID NO: 10697 - protein, 8 aa, Homo sapiens
  Heavy chain CDR1
GFTFRGYG

SEQ ID NO: 10698 - protein, 8 aa, Homo sapiens
  Heavy chain CDR1
GFTFSNFG

SEQ ID NO: 10699 - protein, 8 aa, Homo sapiens
  Heavy chain CDR1
GYTFTSYG

SEQ ID NO: 10700 - protein, 8 aa, Homo sapiens
  Heavy chain CDR1
GFTFSSYG

SEQ ID NO: 10701 - protein, 8 aa, Homo sapiens
  Heavy chain CDR1
GFTFDDYG

SEQ ID NO: 10702 - protein, 8 aa, Homo sapiens
  Heavy chain CDR1
GFTFDDYG

SEQ ID NO: 10703 - protein, 8 aa, Homo sapiens
  Heavy chain CDR1
GFIFEDYG

SEQ ID NO: 10704 - protein, 8 aa, Homo sapiens
  Heavy chain CDR1
GFTFDDYG

SEQ ID NO: 10705 - protein, 8 aa, Homo sapiens
  Heavy chain CDR1
GYTFTSYG

SEQ ID NO: 10706 - protein, 8 aa, Homo sapiens
  Heavy chain CDR1
GFIFEDYG

SEQ ID NO: 10707 - protein, 8 aa, Homo sapiens
  Heavy chain CDR1
GFIFEDYG

SEQ ID NO: 10708 - protein, 8 aa, Homo sapiens
  Heavy chain CDR1
GFIFEDYG

SEQ ID NO: 10709 - protein, 8 aa, Homo sapiens
  Heavy chain CDR1
GFTFDDYG

SEQ ID NO: 10710 - protein, 8 aa, Homo sapiens
  Heavy chain CDR1
GFIFEDYG

SEQ ID NO: 10711 - protein, 8 aa, Homo sapiens
  Heavy chain CDR1
GFTLRGYG

SEQ ID NO: 10712 - protein, 8 aa, Homo sapiens
  Heavy chain CDR1
GFIFEDYG

SEQ ID NO: 10713 - protein, 8 aa, Homo sapiens
  Heavy chain CDR1
GYTFTSYG

SEQ ID NO: 10714 - protein, 8 aa, Homo sapiens
  Heavy chain CDR1
GFTFDDYG

SEQ ID NO: 10715 - protein, 8 aa, Homo sapiens
  Heavy chain CDR1
GFIFSSYG

SEQ ID NO: 10716 - protein, 8 aa, Homo sapiens
  Heavy chain CDR1
GYTFTNYG

SEQ ID NO: 10717 - protein, 8 aa, Homo sapiens
  Heavy chain CDR1
GFIFEDYG

SEQ ID NO: 10718 - protein, 8 aa, Homo sapiens
  Heavy chain CDR1
GYTFTSYG

SEQ ID NO: 10719 - protein, 8 aa, Homo sapiens
  Heavy chain CDR1
GFTFSSHG

SEQ ID NO: 10720 - protein, 8 aa, Homo sapiens
  Heavy chain CDR1
GYTFNSYG

SEQ ID NO: 10721 - protein, 8 aa, Homo sapiens
  Heavy chain CDR1
GFIFSSYG

SEQ ID NO: 10722 - protein, 8 aa, Homo sapiens
  Heavy chain CDR1
GFTFSSYG

SEQ ID NO: 10723 - protein, 8 aa, Homo sapiens
  Heavy chain CDR1
GFTFSSHG

SEQ ID NO: 10724 - protein, 8 aa, Homo sapiens
  Heavy chain CDR1
GFTFSSHG

SEQ ID NO: 10725 - protein, 8 aa, Homo sapiens
  Heavy chain CDR1
GFTFSSHA

SEQ ID NO: 10726 - protein, 8 aa, Homo sapiens
  Heavy chain CDR1
GFTFSSYG

SEQ ID NO: 10727 - protein, 8 aa, Homo sapiens
  Heavy chain CDR1
GGSISSYY

SEQ ID NO: 10728 - protein, 8 aa, Homo sapiens
  Heavy chain CDR1
GFTFSSHA

SEQ ID NO: 10729 - protein, 8 aa, Homo sapiens
  Heavy chain CDR1
GYTFTSYG

SEQ ID NO: 10730 - protein, 8 aa, Homo sapiens
  Heavy chain CDR1
GFTFSSHG

SEQ ID NO: 10731 - protein, 8 aa, Homo sapiens
  Heavy chain CDR1
GFTFSSYG

SEQ ID NO: 10732 - protein, 8 aa, Homo sapiens
  Heavy chain CDR1
GFTFSTHG

SEQ ID NO: 10733 - protein, 8 aa, Homo sapiens
  Heavy chain CDR1
GFTFSTHG

SEQ ID NO: 10734 - protein, 8 aa, Homo sapiens
  Heavy chain CDR1
GFTFSSYG

SEQ ID NO: 10735 - protein, 8 aa, Homo sapiens
  Heavy chain CDR1
GFTFSTHG

SEQ ID NO: 10736 - protein, 8 aa, Homo sapiens
  Heavy chain CDR1
GYTFTSYG

SEQ ID NO: 10737 - protein, 8 aa, Homo sapiens
  Heavy chain CDR1
GYTFTSYG

SEQ ID NO: 10738 - protein, 8 aa, Homo sapiens
  Heavy chain CDR1
GYTFTSYG

SEQ ID NO: 10739 - protein, 8 aa, Homo sapiens
  Heavy chain CDR1
GYTFTSYG

SEQ ID NO: 10740 - protein, 8 aa, Homo sapiens
  Heavy chain CDR1
GYTFTSYG

SEQ ID NO: 10741 - protein, 8 aa, Homo sapiens
  Heavy chain CDR1
GFTFSSYG

SEQ ID NO: 10742 - protein, 8 aa, Homo sapiens
  Heavy chain CDR1
GFTFSSYG

SEQ ID NO: 10743 - protein, 8 aa, Homo sapiens
  Heavy chain CDR1
GFTFSSHG

SEQ ID NO: 10744 - protein, 8 aa, Homo sapiens
  Heavy chain CDR1
GYTFTSYG

SEQ ID NO: 10745 - protein, 8 aa, Homo sapiens
  Heavy chain CDR1
GYTFTNYG

SEQ ID NO: 10746 - protein, 8 aa, Homo sapiens
  Heavy chain CDR1
GYTFTSYG

SEQ ID NO: 10747 - protein, 8 aa, Homo sapiens
  Heavy chain CDR1
GYTFTSYG

SEQ ID NO: 10748 - protein, 8 aa, Homo sapiens
  Heavy chain CDR1
GFTFSSYG

SEQ ID NO: 10749 - protein, 8 aa, Homo sapiens
  Heavy chain CDR1
GYTFTSYG

SEQ ID NO: 10750 - protein, 8 aa, Homo sapiens
  Heavy chain CDR1
GFTFSTHG

SEQ ID NO: 10751 - protein, 8 aa, Homo sapiens
  Heavy chain CDR1
GFTFSSHG

SEQ ID NO: 10752 - protein, 8 aa, Homo sapiens
  Heavy chain CDR1
GYTFTSYG

SEQ ID NO: 10753 - protein, 8 aa, Homo sapiens
  Heavy chain CDR1
GFTFSSHG

SEQ ID NO: 10754 - protein, 8 aa, Homo sapiens
  Heavy chain CDR1
GYTFNSYG

SEQ ID NO: 10755 - protein, 8 aa, Homo sapiens
  Heavy chain CDR1
GFTFSSYG

SEQ ID NO: 10756 - protein, 8 aa, Homo sapiens
  Heavy chain CDR1
GFTFSSYG

SEQ ID NO: 10757 - protein, 8 aa, Homo sapiens
  Heavy chain CDR1
GFTFSSHG

SEQ ID NO: 10758 - protein, 8 aa, Homo sapiens
  Heavy chain CDR1
GFTFSSHG

SEQ ID NO: 10759 - protein, 8 aa, Homo sapiens
  Heavy chain CDR1
GFTFSSYG

SEQ ID NO: 10760 - protein, 8 aa, Homo sapiens
  Heavy chain CDR1
GFTFSSYG

SEQ ID NO: 10761 - protein, 8 aa, Homo sapiens
  Heavy chain CDR1
GFTFSSYG

SEQ ID NO: 10762 - protein, 8 aa, Homo sapiens
  Heavy chain CDR1
GFTFRSYG

SEQ ID NO: 10763 - protein, 8 aa, Homo sapiens
  Heavy chain CDR1
GFTFSSYG

SEQ ID NO: 10764 - protein, 8 aa, Homo sapiens
  Heavy chain CDR1
GFTFSSYG

SEQ ID NO: 10765 - protein, 8 aa, Homo sapiens
  Heavy chain CDR1
GFAFSSYG

SEQ ID NO: 10766 - protein, 8 aa, Homo sapiens
  Heavy chain CDR1
GFTFSSYG

SEQ ID NO: 10767 - protein, 8 aa, Homo sapiens
  Heavy chain CDR1
GFTFSSYG

SEQ ID NO: 10768 - protein, 8 aa, Homo sapiens
  Heavy chain CDR1
GFTFSSYG

SEQ ID NO: 10769 - protein, 8 aa, Homo sapiens
  Heavy chain CDR1
GFTFSSYG

SEQ ID NO: 10770 - protein, 8 aa, Homo sapiens
  Heavy chain CDR1
GFTFSSYG

SEQ ID NO: 10771 - protein, 8 aa, Homo sapiens
  Heavy chain CDR1
GFTFSSYG

SEQ ID NO: 10772 - protein, 8 aa, Homo sapiens
  Heavy chain CDR1
GFTFSSYG

SEQ ID NO: 10773 - protein, 8 aa, Homo sapiens
  Heavy chain CDR1
GFTFSSYG

SEQ ID NO: 10774 - protein, 8 aa, Homo sapiens
  Heavy chain CDR1
GFTFSSYG

SEQ ID NO: 10775 - protein, 8 aa, Homo sapiens
  Heavy chain CDR1
GFTFSSYG

SEQ ID NO: 10776 - protein, 8 aa, Homo sapiens
  Heavy chain CDR1
GFTFSSYG

SEQ ID NO: 10777 - protein, 8 aa, Homo sapiens
  Heavy chain CDR1
GFTFSSYG

SEQ ID NO: 10778 - protein, 8 aa, Homo sapiens
  Heavy chain CDR1
GFTFSSYG

SEQ ID NO: 10779 - protein, 8 aa, Homo sapiens
  Heavy chain CDR1
GFTFSSYG

SEQ ID NO: 10780 - protein, 8 aa, Homo sapiens
  Heavy chain CDR1
GFTFSSYG

SEQ ID NO: 10781 - protein, 8 aa, Homo sapiens
  Heavy chain CDR1
GFTFSSFG

SEQ ID NO: 10782 - protein, 8 aa, Homo sapiens
  Heavy chain CDR1
GFTFSSYG

SEQ ID NO: 10783 - protein, 8 aa, Homo sapiens
  Heavy chain CDR1
GFTFSSYG

SEQ ID NO: 10784 - protein, 8 aa, Homo sapiens
  Heavy chain CDR1
GGSISSYY

SEQ ID NO: 10785 - protein, 8 aa, Homo sapiens
  Heavy chain CDR1
GFIFSSYG

SEQ ID NO: 10786 - protein, 8 aa, Homo sapiens
  Heavy chain CDR1
GFTFSIYT

SEQ ID NO: 10787 - protein, 8 aa, Homo sapiens
  Heavy chain CDR1
GFTFSSFG

SEQ ID NO: 10788 - protein, 8 aa, Homo sapiens
  Heavy chain CDR1
GFTFSSYG

SEQ ID NO: 10789 - protein, 8 aa, Homo sapiens
  Heavy chain CDR1
GFTFSSHG

SEQ ID NO: 10790 - protein, 8 aa, Homo sapiens
  Heavy chain CDR1
GFTFSSHG

SEQ ID NO: 10791 - protein, 8 aa, Homo sapiens
  Heavy chain CDR1
GFTFSSYG

SEQ ID NO: 10792 - protein, 8 aa, Homo sapiens
  Heavy chain CDR1
GGSISSYY

SEQ ID NO: 10793 - protein, 8 aa, Homo sapiens
  Heavy chain CDR1
GFTFSSHG

SEQ ID NO: 10794 - protein, 8 aa, Homo sapiens
  Heavy chain CDR1
GFTFSSYG

SEQ ID NO: 10795 - protein, 8 aa, Homo sapiens
  Heavy chain CDR1
GFTFSSYG

SEQ ID NO: 10796 - protein, 8 aa, Homo sapiens
  Heavy chain CDR1
GFTFSNYG

SEQ ID NO: 10797 - protein, 8 aa, Homo sapiens
  Heavy chain CDR1
GFTFSSYG

SEQ ID NO: 10798 - protein, 8 aa, Homo sapiens
  Heavy chain CDR1
GFTFSSYW

SEQ ID NO: 10799 - protein, 8 aa, Homo sapiens
  Heavy chain CDR1
GFTFSSYA

SEQ ID NO: 10800 - protein, 10 aa, Homo sapiens
  Heavy chain CDR1
GGSISSSSYY

SEQ ID NO: 10801 - protein, 8 aa, Homo sapiens
  Heavy chain CDR1
GFTFSSYG

SEQ ID NO: 10802 - protein, 8 aa, Homo sapiens
  Heavy chain CDR1
GFTLSSYG

SEQ ID NO: 10803 - protein, 8 aa, Homo sapiens
  Heavy chain CDR1
GFTFSSYG

SEQ ID NO: 10804 - protein, 8 aa, Homo sapiens
  Heavy chain CDR1
GYTFTSYG

SEQ ID NO: 10805 - protein, 8 aa, Homo sapiens
  Heavy chain CDR1
GFTFSSYG

SEQ ID NO: 10806 - protein, 8 aa, Homo sapiens
  Heavy chain CDR1
GFTFSSYG

SEQ ID NO: 10807 - protein, 8 aa, Homo sapiens
  Heavy chain CDR1
GFTFSSFG

SEQ ID NO: 10808 - protein, 8 aa, Homo sapiens
  Heavy chain CDR1
GYTFTNYG

SEQ ID NO: 10809 - protein, 8 aa, Homo sapiens
  Heavy chain CDR1
GFTFSSYG

SEQ ID NO: 10810 - protein, 8 aa, Homo sapiens
  Heavy chain CDR1
GFTFSSYG

SEQ ID NO: 10811 - protein, 10 aa, Homo sapiens
  Heavy chain CDR1
GDSVSSNRAA

SEQ ID NO: 10812 - protein, 8 aa, Homo sapiens
  Heavy chain CDR1
GFTFGDYA

SEQ ID NO: 10813 - protein, 8 aa, Homo sapiens
  Heavy chain CDR1
GFTFSSYG

SEQ ID NO: 10814 - protein, 8 aa, Homo sapiens
  Heavy chain CDR1
GYTFTSYG

SEQ ID NO: 10815 - protein, 8 aa, Homo sapiens
  Heavy chain CDR1
GFTFRSYG

SEQ ID NO: 10816 - protein, 8 aa, Homo sapiens
  Heavy chain CDR1
GFTFSSYG

SEQ ID NO: 10817 - protein, 8 aa, Homo sapiens
  Heavy chain CDR1
GVSISSYY

SEQ ID NO: 10818 - protein, 8 aa, Homo sapiens
  Heavy chain CDR1
GFTFSSYG

SEQ ID NO: 10819 - protein, 8 aa, Homo sapiens
  Heavy chain CDR1
GFTFSSHG

SEQ ID NO: 10820 - protein, 8 aa, Homo sapiens
  Heavy chain CDR1
GFTFSSYG

SEQ ID NO: 10821 - protein, 8 aa, Homo sapiens
  Heavy chain CDR1
GFTFSSYG

SEQ ID NO: 10822 - protein, 8 aa, Homo sapiens
  Heavy chain CDR1
GFTFSSYG

SEQ ID NO: 10823 - protein, 8 aa, Homo sapiens
  Heavy chain CDR1
GFTFSNYG

SEQ ID NO: 10824 - protein, 8 aa, Homo sapiens
  Heavy chain CDR1
GFTFSSFG

SEQ ID NO: 10825 - protein, 8 aa, Homo sapiens
  Heavy chain CDR1
GFTFSSYG

SEQ ID NO: 10826 - protein, 8 aa, Homo sapiens
  Heavy chain CDR1
GFTFSSHG

SEQ ID NO: 10827 - protein, 8 aa, Homo sapiens
  Heavy chain CDR1
GFTFSSYG

SEQ ID NO: 10828 - protein, 8 aa, Homo sapiens
  Heavy chain CDR1
GYTFTSYG

SEQ ID NO: 10829 - protein, 8 aa, Homo sapiens
  Heavy chain CDR1
GFTFSSHG

SEQ ID NO: 10830 - protein, 8 aa, Homo sapiens
  Heavy chain CDR1
GFTFSSHG

SEQ ID NO: 10831 - protein, 8 aa, Homo sapiens
  Heavy chain CDR1
GFTFSSHG

SEQ ID NO: 10832 - protein, 8 aa, Homo sapiens
  Heavy chain CDR1
GFTFSSYG

SEQ ID NO: 10833 - protein, 8 aa, Homo sapiens
  Heavy chain CDR1
GFTFSSYG

SEQ ID NO: 10834 - protein, 8 aa, Homo sapiens
  Heavy chain CDR1
GFTFSSHG

SEQ ID NO: 10835 - protein, 8 aa, Homo sapiens
  Heavy chain CDR1
GFTFSSYG

SEQ ID NO: 10836 - protein, 8 aa, Homo sapiens
  Heavy chain CDR1
GFTFSSYG

SEQ ID NO: 10837 - protein, 8 aa, Homo sapiens
  Heavy chain CDR1
GFTFSSYG

SEQ ID NO: 10838 - protein, 8 aa, Homo sapiens
  Heavy chain CDR1
GFTFSSYG

SEQ ID NO: 10839 - protein, 8 aa, Homo sapiens
  Heavy chain CDR1
GFTFSSHG

SEQ ID NO: 10840 - protein, 8 aa, Homo sapiens
  Heavy chain CDR1
GFTFSSYG

SEQ ID NO: 10841 - protein, 8 aa, Homo sapiens
  Heavy chain CDR1
GFTFSNYA

SEQ ID NO: 10842 - protein, 8 aa, Homo sapiens
  Heavy chain CDR1
GFTFSSYG

SEQ ID NO: 10843 - protein, 8 aa, Homo sapiens
  Heavy chain CDR1
GFTFSSYG

SEQ ID NO: 10844 - protein, 8 aa, Homo sapiens
  Heavy chain CDR1
GFTFSSYG

SEQ ID NO: 10845 - protein, 8 aa, Homo sapiens
  Heavy chain CDR1
GFTFSSHG

SEQ ID NO: 10846 - protein, 8 aa, Homo sapiens
  Heavy chain CDR1
GFTFSSYG

SEQ ID NO: 10847 - protein, 8 aa, Homo sapiens
  Heavy chain CDR1
GFTFSSHG

SEQ ID NO: 10848 - protein, 8 aa, Homo sapiens
  Heavy chain CDR1
GFTFSSYG

SEQ ID NO: 10849 - protein, 8 aa, Homo sapiens
  Heavy chain CDR1
GFTFSSHG

SEQ ID NO: 10850 - protein, 8 aa, Homo sapiens
  Heavy chain CDR1
GFTFSSHG

SEQ ID NO: 10851 - protein, 8 aa, Homo sapiens
  Heavy chain CDR1
GFTFSSHG

SEQ ID NO: 10852 - protein, 8 aa, Homo sapiens
  Heavy chain CDR1
GFTFSSHG

SEQ ID NO: 10853 - protein, 8 aa, Homo sapiens
  Heavy chain CDR1
GFTFSSHG

SEQ ID NO: 10854 - protein, 8 aa, Homo sapiens
  Heavy chain CDR1
GFTFSSYG

SEQ ID NO: 10855 - protein, 8 aa, Homo sapiens
  Heavy chain CDR1
GFTFSSYG

SEQ ID NO: 10856 - protein, 8 aa, Homo sapiens
  Heavy chain CDR1
GFTFSSYG

SEQ ID NO: 10857 - protein, 8 aa, Homo sapiens
  Heavy chain CDR1
GFTFSSYG

SEQ ID NO: 10858 - protein, 8 aa, Homo sapiens
  Heavy chain CDR1
GYTFTDYG

SEQ ID NO: 10859 - protein, 8 aa, Homo sapiens
  Heavy chain CDR1
GFTLSSFG

SEQ ID NO: 10860 - protein, 8 aa, Homo sapiens
  Heavy chain CDR1
GFTFSNYA

SEQ ID NO: 10861 - protein, 8 aa, Homo sapiens
  Heavy chain CDR1
GFTFSSYG

SEQ ID NO: 10862 - protein, 8 aa, Homo sapiens
  Heavy chain CDR1
GFTFRSYG

SEQ ID NO: 10863 - protein, 8 aa, Homo sapiens
  Heavy chain CDR1
GFTFSSYG

SEQ ID NO: 10864 - protein, 8 aa, Homo sapiens
  Heavy chain CDR1
GFTFSSYG

SEQ ID NO: 10865 - protein, 8 aa, Homo sapiens
  Heavy chain CDR1
GFTFSSYA

SEQ ID NO: 10866 - protein, 8 aa, Homo sapiens
  Heavy chain CDR1
GFTFSSYG

SEQ ID NO: 10867 - protein, 8 aa, Homo sapiens
  Heavy chain CDR1
GFTFSRFG

SEQ ID NO: 10868 - protein, 8 aa, Homo sapiens
  Heavy chain CDR1
GYTFNYYG

SEQ ID NO: 10869 - protein, 8 aa, Homo sapiens
  Heavy chain CDR1
GFTLSSFG

SEQ ID NO: 10870 - protein, 8 aa, Homo sapiens
  Heavy chain CDR1
GFTFSNYG

SEQ ID NO: 10871 - protein, 8 aa, Homo sapiens
  Heavy chain CDR1
GFTFNSYG

SEQ ID NO: 10872 - protein, 8 aa, Homo sapiens
  Heavy chain CDR1
GFTFSSYG

SEQ ID NO: 10873 - protein, 8 aa, Homo sapiens
  Heavy chain CDR1
DYTFTYYG

SEQ ID NO: 10874 - protein, 8 aa, Homo sapiens
  Heavy chain CDR1
GYTFTSYG

SEQ ID NO: 10875 - protein, 8 aa, Homo sapiens
  Heavy chain CDR1
GFTFSSYG

SEQ ID NO: 10876 - protein, 8 aa, Homo sapiens
  Heavy chain CDR1
GFTFSSYG

SEQ ID NO: 10877 - protein, 8 aa, Homo sapiens
  Heavy chain CDR1
GFTFSNYG

SEQ ID NO: 10878 - protein, 8 aa, Homo sapiens
  Heavy chain CDR1
GYTFTSYG

SEQ ID NO: 10879 - protein, 8 aa, Homo sapiens
  Heavy chain CDR1
GFTFSSYG

SEQ ID NO: 10880 - protein, 8 aa, Homo sapiens
  Heavy chain CDR1
GFTFSSYG

SEQ ID NO: 10881 - protein, 8 aa, Homo sapiens
  Heavy chain CDR1
GFTFSSHG

SEQ ID NO: 10882 - protein, 8 aa, Homo sapiens
  Heavy chain CDR1
GFTFSSYG

SEQ ID NO: 10883 - protein, 8 aa, Homo sapiens
  Heavy chain CDR1
GFTFSSYG

SEQ ID NO: 10884 - protein, 8 aa, Homo sapiens
  Heavy chain CDR1
GYTFTSYG

SEQ ID NO: 10885 - protein, 8 aa, Homo sapiens
  Heavy chain CDR1
GYTFTSYG

SEQ ID NO: 10886 - protein, 8 aa, Homo sapiens
  Heavy chain CDR1
GFTLSSYG

SEQ ID NO: 10887 - protein, 8 aa, Homo sapiens
  Heavy chain CDR1
GFTFSSYG

SEQ ID NO: 10888 - protein, 8 aa, Homo sapiens
  Heavy chain CDR1
GFTFSSYG

SEQ ID NO: 10889 - protein, 8 aa, Homo sapiens
  Heavy chain CDR1
GFIFSSYG

SEQ ID NO: 10890 - protein, 8 aa, Homo sapiens
  Heavy chain CDR1
GFTLSSFG

SEQ ID NO: 10891 - protein, 8 aa, Homo sapiens
  Heavy chain CDR1
GYTFTSYG

SEQ ID NO: 10892 - protein, 8 aa, Homo sapiens
  Heavy chain CDR1
GFTFSSYG

SEQ ID NO: 10893 - protein, 8 aa, Homo sapiens
  Heavy chain CDR1
GFTFSSYG

SEQ ID NO: 10894 - protein, 8 aa, Homo sapiens
  Heavy chain CDR1
GFTFSRYG

SEQ ID NO: 10895 - protein, 8 aa, Homo sapiens
  Heavy chain CDR1
GFTFSSYG

SEQ ID NO: 10896 - protein, 8 aa, Homo sapiens
  Heavy chain CDR1
GFTFSSYG

SEQ ID NO: 10897 - protein, 8 aa, Homo sapiens
  Heavy chain CDR1
GFTFSSYG

SEQ ID NO: 10898 - protein, 8 aa, Homo sapiens
  Heavy chain CDR1
GYTFTNYG

SEQ ID NO: 10899 - protein, 8 aa, Homo sapiens
  Heavy chain CDR1
GFTFSSHG

SEQ ID NO: 10900 - protein, 8 aa, Homo sapiens
  Heavy chain CDR1
GFTFSSYG

SEQ ID NO: 10901 - protein, 8 aa, Homo sapiens
  Heavy chain CDR1
GYTFTNYG

SEQ ID NO: 10902 - protein, 8 aa, Homo sapiens
  Heavy chain CDR1
GFTFSSYG

SEQ ID NO: 10903 - protein, 8 aa, Homo sapiens
  Heavy chain CDR1
GFTFSSYG

SEQ ID NO: 10904 - protein, 8 aa, Homo sapiens
  Heavy chain CDR1
GYTFTNYG

SEQ ID NO: 10905 - protein, 8 aa, Homo sapiens
  Heavy chain CDR1
GYTFTSYG

SEQ ID NO: 10906 - protein, 8 aa, Homo sapiens
  Heavy chain CDR1
GFTFSSYG

SEQ ID NO: 10907 - protein, 8 aa, Homo sapiens
  Heavy chain CDR1
GFTFSSYG

SEQ ID NO: 10908 - protein, 8 aa, Homo sapiens
  Heavy chain CDR1
GFTFSSYG

SEQ ID NO: 10909 - protein, 8 aa, Homo sapiens
  Heavy chain CDR1
GYTFTNYG

SEQ ID NO: 10910 - protein, 8 aa, Homo sapiens
  Heavy chain CDR1
GYTFTSYG

SEQ ID NO: 10911 - protein, 8 aa, Homo sapiens
  Heavy chain CDR1
GYTFTSYG

SEQ ID NO: 10912 - protein, 8 aa, Homo sapiens
  Heavy chain CDR1
GFTFSSNG

SEQ ID NO: 10913 - protein, 8 aa, Homo sapiens
  Heavy chain CDR1
GFTFSSYG

SEQ ID NO: 10914 - protein, 8 aa, Homo sapiens
  Heavy chain CDR1
GFTFSSYG

SEQ ID NO: 10915 - protein, 8 aa, Homo sapiens
  Heavy chain CDR1
GYTFTSYG

SEQ ID NO: 10916 - protein, 8 aa, Homo sapiens
  Heavy chain CDR1
GFTFSRYG

SEQ ID NO: 10917 - protein, 8 aa, Homo sapiens
  Heavy chain CDR1
GYTFTNYG

SEQ ID NO: 10918 - protein, 8 aa, Homo sapiens
  Heavy chain CDR1
GFNFSSYG

SEQ ID NO: 10919 - protein, 8 aa, Homo sapiens
  Heavy chain CDR1
GFTFSSYG

SEQ ID NO: 10920 - protein, 8 aa, Homo sapiens
  Heavy chain CDR1
GYTFTSYG

SEQ ID NO: 10921 - protein, 8 aa, Homo sapiens
  Heavy chain CDR1
GFTFSSYG

SEQ ID NO: 10922 - protein, 8 aa, Homo sapiens
  Heavy chain CDR1
GFTFSSYG

SEQ ID NO: 10923 - protein, 8 aa, Homo sapiens
  Heavy chain CDR1
GFTFSSYG

SEQ ID NO: 10924 - protein, 8 aa, Homo sapiens
  Heavy chain CDR1
GFTFSSYG

SEQ ID NO: 10925 - protein, 8 aa, Homo sapiens
  Heavy chain CDR1
GFTFRSYG

SEQ ID NO: 10926 - protein, 8 aa, Homo sapiens
  Heavy chain CDR1
GFTFSSHG

SEQ ID NO: 10927 - protein, 8 aa, Homo sapiens
  Heavy chain CDR1
GFTFSSYG

SEQ ID NO: 10928 - protein, 8 aa, Homo sapiens
  Heavy chain CDR1
GFTFSSYG

SEQ ID NO: 10929 - protein, 8 aa, Homo sapiens
  Heavy chain CDR1
GFTFSRYG

SEQ ID NO: 10930 - protein, 8 aa, Homo sapiens
  Heavy chain CDR1
GFTFSSYG

SEQ ID NO: 10931 - protein, 8 aa, Homo sapiens
  Heavy chain CDR1
GFTFSNYG

SEQ ID NO: 10932 - protein, 8 aa, Homo sapiens
  Heavy chain CDR1
GFTFSSYG

SEQ ID NO: 10933 - protein, 8 aa, Homo sapiens
  Heavy chain CDR1
GFTLSNYG

SEQ ID NO: 10934 - protein, 8 aa, Homo sapiens
  Heavy chain CDR1
GFTFSSYG

SEQ ID NO: 10935 - protein, 8 aa, Homo sapiens
  Heavy chain CDR1
GYTFTSYG

SEQ ID NO: 10936 - protein, 8 aa, Homo sapiens
  Heavy chain CDR1
GFTFSNYG

SEQ ID NO: 10937 - protein, 8 aa, Homo sapiens
  Heavy chain CDR1
GFTFSSYG

SEQ ID NO: 10938 - protein, 8 aa, Homo sapiens
  Heavy chain CDR1
GFTFSSFG

SEQ ID NO: 10939 - protein, 8 aa, Homo sapiens
  Heavy chain CDR1
GFTFSSYG

SEQ ID NO: 10940 - protein, 8 aa, Homo sapiens
  Heavy chain CDR1
GYTFTSYY

SEQ ID NO: 10941 - protein, 8 aa, Homo sapiens
  Heavy chain CDR1
GYTFTSYY

SEQ ID NO: 10942 - protein, 10 aa, Homo sapiens
  Heavy chain CDR1
GGSISSSSYY

SEQ ID NO: 10943 - protein, 8 aa, Homo sapiens
  Heavy chain CDR1
GFTLSNYG

SEQ ID NO: 10944 - protein, 8 aa, Homo sapiens
  Heavy chain CDR1
GFTFSSYG

SEQ ID NO: 10945 - protein, 8 aa, Homo sapiens
  Heavy chain CDR1
GFTFSSYG

SEQ ID NO: 10946 - protein, 8 aa, Homo sapiens
  Heavy chain CDR1
GFTFSSYG

SEQ ID NO: 10947 - protein, 8 aa, Homo sapiens
  Heavy chain CDR1
GFTFSSYG

SEQ ID NO: 10948 - protein, 8 aa, Homo sapiens
  Heavy chain CDR1
GFTFSSYG

SEQ ID NO: 10949 - protein, 8 aa, Homo sapiens
  Heavy chain CDR1
GFTFSNYG

SEQ ID NO: 10950 - protein, 8 aa, Homo sapiens
  Heavy chain CDR1
GYTFTSYG

SEQ ID NO: 10951 - protein, 8 aa, Homo sapiens
  Heavy chain CDR1
GFTFSSYG

SEQ ID NO: 10952 - protein, 8 aa, Homo sapiens
  Heavy chain CDR1
GFTFSSYG

SEQ ID NO: 10953 - protein, 8 aa, Homo sapiens
  Heavy chain CDR1
GFTFSSYG

SEQ ID NO: 10954 - protein, 8 aa, Homo sapiens
  Heavy chain CDR1
GFTFSSYG

SEQ ID NO: 10955 - protein, 8 aa, Homo sapiens
  Heavy chain CDR1
GFTFSRYG

SEQ ID NO: 10956 - protein, 8 aa, Homo sapiens
  Heavy chain CDR1
GFTFSSYG

SEQ ID NO: 10957 - protein, 10 aa, Homo sapiens
  Heavy chain CDR1
GGSISSSSYY

SEQ ID NO: 10958 - protein, 8 aa, Homo sapiens
  Heavy chain CDR1
GFTFSSYG

SEQ ID NO: 10959 - protein, 8 aa, Homo sapiens
  Heavy chain CDR1
GYTFTSYG

SEQ ID NO: 10960 - protein, 8 aa, Homo sapiens
  Heavy chain CDR1
GFTFSSYG

SEQ ID NO: 10961 - protein, 8 aa, Homo sapiens
  Heavy chain CDR1
GYTFTSYG

SEQ ID NO: 10962 - protein, 8 aa, Homo sapiens
  Heavy chain CDR1
GFTFSSYG

SEQ ID NO: 10963 - protein, 8 aa, Homo sapiens
  Heavy chain CDR1
GFTLSNYG

SEQ ID NO: 10964 - protein, 8 aa, Homo sapiens
  Heavy chain CDR1
GFTFSSHG

SEQ ID NO: 10965 - protein, 8 aa, Homo sapiens
  Heavy chain CDR1
GFTFSSYG

SEQ ID NO: 10966 - protein, 8 aa, Homo sapiens
  Heavy chain CDR1
GFTLSNYG

SEQ ID NO: 10967 - protein, 10 aa, Homo sapiens
  Heavy chain CDR1
GGSISSSSYY

SEQ ID NO: 10968 - protein, 8 aa, Homo sapiens
  Heavy chain CDR1
GYTFTSYG

SEQ ID NO: 10969 - protein, 8 aa, Homo sapiens
  Heavy chain CDR1
GFTLSNYG

SEQ ID NO: 10970 - protein, 8 aa, Homo sapiens
  Heavy chain CDR1
GFTFSNYG

SEQ ID NO: 10971 - protein, 8 aa, Homo sapiens
  Heavy chain CDR1
GFTFSSYG

SEQ ID NO: 10972 - protein, 8 aa, Homo sapiens
  Heavy chain CDR1
GFTFSRYG

SEQ ID NO: 10973 - protein, 8 aa, Homo sapiens
  Heavy chain CDR1
GFTFSNYG

SEQ ID NO: 10974 - protein, 8 aa, Homo sapiens
  Heavy chain CDR1
GFTFSRYG

SEQ ID NO: 10975 - protein, 8 aa, Homo sapiens
  Heavy chain CDR1
GFTFSRYG

SEQ ID NO: 10976 - protein, 7 aa, Homo sapiens
  Heavy chain CDR2
IYYTGST

SEQ ID NO: 10977 - protein, 7 aa, Homo sapiens
  Heavy chain CDR2
IYYSGNT

SEQ ID NO: 10978 - protein, 7 aa, Homo sapiens
  Heavy chain CDR2
IYYSGNT

SEQ ID NO: 10979 - protein, 7 aa, Homo sapiens
  Heavy chain CDR2
IYYSGNT

SEQ ID NO: 10980 - protein, 8 aa, Homo sapiens
  Heavy chain CDR2
ISYDGSNK

SEQ ID NO: 10981 - protein, 7 aa, Homo sapiens
  Heavy chain CDR2
IYYSGNT

SEQ ID NO: 10982 - protein, 7 aa, Homo sapiens
  Heavy chain CDR2
IYYSGNT

SEQ ID NO: 10983 - protein, 7 aa, Homo sapiens
  Heavy chain CDR2
IYYSGST

SEQ ID NO: 10984 - protein, 10 aa, Homo sapiens
  Heavy chain CDR2
IKSKTDGGTT

SEQ ID NO: 10985 - protein, 8 aa, Homo sapiens
  Heavy chain CDR2
ISAYNGNT

SEQ ID NO: 10986 - protein, 7 aa, Homo sapiens
  Heavy chain CDR2
IYYSGNT

SEQ ID NO: 10987 - protein, 8 aa, Homo sapiens
  Heavy chain CDR2
INWNGGST

SEQ ID NO: 10988 - protein, 7 aa, Homo sapiens
  Heavy chain CDR2
IYYSGNT

SEQ ID NO: 10989 - protein, 8 aa, Homo sapiens
  Heavy chain CDR2
INWNGGST

SEQ ID NO: 10990 - protein, 7 aa, Homo sapiens
  Heavy chain CDR2
IYYSGNT

SEQ ID NO: 10991 - protein, 7 aa, Homo sapiens
  Heavy chain CDR2
IYYSGNT

SEQ ID NO: 10992 - protein, 8 aa, Homo sapiens
  Heavy chain CDR2
IWYDGSNK

SEQ ID NO: 10993 - protein, 10 aa, Homo sapiens
  Heavy chain CDR2
IKSKTDGGTT

SEQ ID NO: 10994 - protein, 7 aa, Homo sapiens
  Heavy chain CDR2
IYYSGNT

SEQ ID NO: 10995 - protein, 7 aa, Homo sapiens
  Heavy chain CDR2
IYYTGST

SEQ ID NO: 10996 - protein, 7 aa, Homo sapiens
  Heavy chain CDR2
IYYTGST

SEQ ID NO: 10997 - protein, 8 aa, Homo sapiens
  Heavy chain CDR2
ISAYNGNT

SEQ ID NO: 10998 - protein, 10 aa, Homo sapiens
  Heavy chain CDR2
IKSKTDGGTT

SEQ ID NO: 10999 - protein, 7 aa, Homo sapiens
  Heavy chain CDR2
IYYTGST

SEQ ID NO: 11000 - protein, 8 aa, Homo sapiens
  Heavy chain CDR2
ISAYNGNT

SEQ ID NO: 11001 - protein, 7 aa, Homo sapiens
  Heavy chain CDR2
IYYTGST

SEQ ID NO: 11002 - protein, 8 aa, Homo sapiens
  Heavy chain CDR2
INWNGGST

SEQ ID NO: 11003 - protein, 8 aa, Homo sapiens
  Heavy chain CDR2
IWYDGSNK

SEQ ID NO: 11004 - protein, 8 aa, Homo sapiens
  Heavy chain CDR2
INWNGGST

SEQ ID NO: 11005 - protein, 7 aa, Homo sapiens
  Heavy chain CDR2
IYYTGST

SEQ ID NO: 11006 - protein, 7 aa, Homo sapiens
  Heavy chain CDR2
MYYSGST

SEQ ID NO: 11007 - protein, 8 aa, Homo sapiens
  Heavy chain CDR2
ISAYNGNT

SEQ ID NO: 11008 - protein, 7 aa, Homo sapiens
  Heavy chain CDR2
IYYTGST

SEQ ID NO: 11009 - protein, 7 aa, Homo sapiens
  Heavy chain CDR2
IYYTGST

SEQ ID NO: 11010 - protein, 8 aa, Homo sapiens
  Heavy chain CDR2
IWHDGSNK

SEQ ID NO: 11011 - protein, 8 aa, Homo sapiens
  Heavy chain CDR2
ISAYNGNT

SEQ ID NO: 11012 - protein, 7 aa, Homo sapiens
  Heavy chain CDR2
IYYSGNT

SEQ ID NO: 11013 - protein, 7 aa, Homo sapiens
  Heavy chain CDR2
IYYTGST

SEQ ID NO: 11014 - protein, 10 aa, Homo sapiens
  Heavy chain CDR2
IKSKTDGGTT

SEQ ID NO: 11015 - protein, 8 aa, Homo sapiens
  Heavy chain CDR2
INWNGGST

SEQ ID NO: 11016 - protein, 7 aa, Homo sapiens
  Heavy chain CDR2
IYYSGNT

SEQ ID NO: 11017 - protein, 7 aa, Homo sapiens
  Heavy chain CDR2
IYYSGNT

SEQ ID NO: 11018 - protein, 7 aa, Homo sapiens
  Heavy chain CDR2
IYYTGST

SEQ ID NO: 11019 - protein, 7 aa, Homo sapiens
  Heavy chain CDR2
IYYSGNT

SEQ ID NO: 11020 - protein, 8 aa, Homo sapiens
  Heavy chain CDR2
INWNGGST

SEQ ID NO: 11021 - protein, 8 aa, Homo sapiens
  Heavy chain CDR2
INWNGGST

SEQ ID NO: 11022 - protein, 8 aa, Homo sapiens
  Heavy chain CDR2
IWYDGNNK

SEQ ID NO: 11023 - protein, 8 aa, Homo sapiens
  Heavy chain CDR2
IWYDGNNK

SEQ ID NO: 11024 - protein, 8 aa, Homo sapiens
  Heavy chain CDR2
IWYDGRNK

SEQ ID NO: 11025 - protein, 8 aa, Homo sapiens
  Heavy chain CDR2
IWYDGSNK

SEQ ID NO: 11026 - protein, 7 aa, Homo sapiens
  Heavy chain CDR2
IYYSGHT

SEQ ID NO: 11027 - protein, 8 aa, Homo sapiens
  Heavy chain CDR2
IFNDGNNK

SEQ ID NO: 11028 - protein, 8 aa, Homo sapiens
  Heavy chain CDR2
TWYDGSNK

SEQ ID NO: 11029 - protein, 8 aa, Homo sapiens
  Heavy chain CDR2
IWYDGSNK

SEQ ID NO: 11030 - protein, 8 aa, Homo sapiens
  Heavy chain CDR2
IWYDGNNK

SEQ ID NO: 11031 - protein, 8 aa, Homo sapiens
  Heavy chain CDR2
TWYDGSNK

SEQ ID NO: 11032 - protein, 8 aa, Homo sapiens
  Heavy chain CDR2
IWYDGNNK

SEQ ID NO: 11033 - protein, 8 aa, Homo sapiens
  Heavy chain CDR2
IWYDGSNK

SEQ ID NO: 11034 - protein, 8 aa, Homo sapiens
  Heavy chain CDR2
IWYDGNNK

SEQ ID NO: 11035 - protein, 8 aa, Homo sapiens
  Heavy chain CDR2
IFNDGNNK

SEQ ID NO: 11036 - protein, 8 aa, Homo sapiens
  Heavy chain CDR2
IWYDGNNK

SEQ ID NO: 11037 - protein, 8 aa, Homo sapiens
  Heavy chain CDR2
IWYGGSNK

SEQ ID NO: 11038 - protein, 8 aa, Homo sapiens
  Heavy chain CDR2
IWYDGNNR

SEQ ID NO: 11039 - protein, 8 aa, Homo sapiens
  Heavy chain CDR2
IWYDGSNK

SEQ ID NO: 11040 - protein, 8 aa, Homo sapiens
  Heavy chain CDR2
TWYDGSNK

SEQ ID NO: 11041 - protein, 8 aa, Homo sapiens
  Heavy chain CDR2
IWYDGSNK

SEQ ID NO: 11042 - protein, 8 aa, Homo sapiens
  Heavy chain CDR2
IWYDGRNK

SEQ ID NO: 11043 - protein, 8 aa, Homo sapiens
  Heavy chain CDR2
IWYDGSNK

SEQ ID NO: 11044 - protein, 8 aa, Homo sapiens
  Heavy chain CDR2
IWYDGNNK

SEQ ID NO: 11045 - protein, 8 aa, Homo sapiens
  Heavy chain CDR2
IWYDGNNK

SEQ ID NO: 11046 - protein, 8 aa, Homo sapiens
  Heavy chain CDR2
IWYDGSNK

SEQ ID NO: 11047 - protein, 8 aa, Homo sapiens
  Heavy chain CDR2
IWYDGNNK

SEQ ID NO: 11048 - protein, 8 aa, Homo sapiens
  Heavy chain CDR2
IWYDGNNK

SEQ ID NO: 11049 - protein, 8 aa, Homo sapiens
  Heavy chain CDR2
IWYDGSNK

SEQ ID NO: 11050 - protein, 8 aa, Homo sapiens
  Heavy chain CDR2
IWYDGSNK

SEQ ID NO: 11051 - protein, 8 aa, Homo sapiens
  Heavy chain CDR2
IWYDGNNK

SEQ ID NO: 11052 - protein, 8 aa, Homo sapiens
  Heavy chain CDR2
IWYDGNNK

SEQ ID NO: 11053 - protein, 8 aa, Homo sapiens
  Heavy chain CDR2
VWYDGSNK

SEQ ID NO: 11054 - protein, 8 aa, Homo sapiens
  Heavy chain CDR2
IWYDGNNK

SEQ ID NO: 11055 - protein, 8 aa, Homo sapiens
  Heavy chain CDR2
IWYDGRNK

SEQ ID NO: 11056 - protein, 8 aa, Homo sapiens
  Heavy chain CDR2
IWYDGSNK

SEQ ID NO: 11057 - protein, 8 aa, Homo sapiens
  Heavy chain CDR2
IWDDGRNK

SEQ ID NO: 11058 - protein, 8 aa, Homo sapiens
  Heavy chain CDR2
IWYDGSNK

SEQ ID NO: 11059 - protein, 8 aa, Homo sapiens
  Heavy chain CDR2
IWYDGSNK

SEQ ID NO: 11060 - protein, 8 aa, Homo sapiens
  Heavy chain CDR2
IWDDGRNK

SEQ ID NO: 11061 - protein, 8 aa, Homo sapiens
  Heavy chain CDR2
LWYDGSNK

SEQ ID NO: 11062 - protein, 8 aa, Homo sapiens
  Heavy chain CDR2
IWDDGRNK

SEQ ID NO: 11063 - protein, 7 aa, Homo sapiens
  Heavy chain CDR2
IYYSGST

SEQ ID NO: 11064 - protein, 7 aa, Homo sapiens
  Heavy chain CDR2
IYYSGST

SEQ ID NO: 11065 - protein, 8 aa, Homo sapiens
  Heavy chain CDR2
IWYDGSNK

SEQ ID NO: 11066 - protein, 8 aa, Homo sapiens
  Heavy chain CDR2
IWYDGRNK

SEQ ID NO: 11067 - protein, 8 aa, Homo sapiens
  Heavy chain CDR2
IWYDGSNK

SEQ ID NO: 11068 - protein, 7 aa, Homo sapiens
  Heavy chain CDR2
IYYSGST

SEQ ID NO: 11069 - protein, 8 aa, Homo sapiens
  Heavy chain CDR2
IWDDGINK

SEQ ID NO: 11070 - protein, 8 aa, Homo sapiens
  Heavy chain CDR2
IWYDGSNK

SEQ ID NO: 11071 - protein, 7 aa, Homo sapiens
  Heavy chain CDR2
IYYSGST

SEQ ID NO: 11072 - protein, 8 aa, Homo sapiens
  Heavy chain CDR2
IWYDGSNK

SEQ ID NO: 11073 - protein, 8 aa, Homo sapiens
  Heavy chain CDR2
IWYDGSNK

SEQ ID NO: 11074 - protein, 7 aa, Homo sapiens
  Heavy chain CDR2
IYYSGST

SEQ ID NO: 11075 - protein, 8 aa, Homo sapiens
  Heavy chain CDR2
IWYDGSNK

SEQ ID NO: 11076 - protein, 8 aa, Homo sapiens
  Heavy chain CDR2
IWYDGSNK

SEQ ID NO: 11077 - protein, 8 aa, Homo sapiens
  Heavy chain CDR2
IWYDGSNK

SEQ ID NO: 11078 - protein, 8 aa, Homo sapiens
  Heavy chain CDR2
IGYDGSDK

SEQ ID NO: 11079 - protein, 7 aa, Homo sapiens
  Heavy chain CDR2
IYYSGST

SEQ ID NO: 11080 - protein, 7 aa, Homo sapiens
  Heavy chain CDR2
IYYSGST

SEQ ID NO: 11081 - protein, 8 aa, Homo sapiens
  Heavy chain CDR2
IWYDGSNK

SEQ ID NO: 11082 - protein, 10 aa, Homo sapiens
  Heavy chain CDR2
IRRKAYGGTT

SEQ ID NO: 11083 - protein, 7 aa, Homo sapiens
  Heavy chain CDR2
IYYSGST

SEQ ID NO: 11084 - protein, 7 aa, Homo sapiens
  Heavy chain CDR2
IYYSGST

SEQ ID NO: 11085 - protein, 7 aa, Homo sapiens
  Heavy chain CDR2
IYYSGST

SEQ ID NO: 11086 - protein, 8 aa, Homo sapiens
  Heavy chain CDR2
IWYDGSNK

SEQ ID NO: 11087 - protein, 7 aa, Homo sapiens
  Heavy chain CDR2
IYYSGST

SEQ ID NO: 11088 - protein, 7 aa, Homo sapiens
  Heavy chain CDR2
IYYSGST

SEQ ID NO: 11089 - protein, 8 aa, Homo sapiens
  Heavy chain CDR2
IWDDGRNK

SEQ ID NO: 11090 - protein, 8 aa, Homo sapiens
  Heavy chain CDR2
IWYDGSNK

SEQ ID NO: 11091 - protein, 8 aa, Homo sapiens
  Heavy chain CDR2
IWYDGSNK

SEQ ID NO: 11092 - protein, 8 aa, Homo sapiens
  Heavy chain CDR2
IWYDGSNK

SEQ ID NO: 11093 - protein, 8 aa, Homo sapiens
  Heavy chain CDR2
IWYDGSNK

SEQ ID NO: 11094 - protein, 7 aa, Homo sapiens
  Heavy chain CDR2
IYYSGST

SEQ ID NO: 11095 - protein, 8 aa, Homo sapiens
  Heavy chain CDR2
IWDDGKNK

SEQ ID NO: 11096 - protein, 8 aa, Homo sapiens
  Heavy chain CDR2
IWYDGSNK

SEQ ID NO: 11097 - protein, 8 aa, Homo sapiens
  Heavy chain CDR2
IWDDGKNK

SEQ ID NO: 11098 - protein, 7 aa, Homo sapiens
  Heavy chain CDR2
IYYSGST

SEQ ID NO: 11099 - protein, 8 aa, Homo sapiens
  Heavy chain CDR2
IWYDGSNK

SEQ ID NO: 11100 - protein, 8 aa, Homo sapiens
  Heavy chain CDR2
IWYDGSNK

SEQ ID NO: 11101 - protein, 7 aa, Homo sapiens
  Heavy chain CDR2
IYYSGST

SEQ ID NO: 11102 - protein, 7 aa, Homo sapiens
  Heavy chain CDR2
IYYSGST

SEQ ID NO: 11103 - protein, 8 aa, Homo sapiens
  Heavy chain CDR2
IWDDGRNK

SEQ ID NO: 11104 - protein, 7 aa, Homo sapiens
  Heavy chain CDR2
IYYSGST

SEQ ID NO: 11105 - protein, 8 aa, Homo sapiens
  Heavy chain CDR2
IWDDGRNK

SEQ ID NO: 11106 - protein, 8 aa, Homo sapiens
  Heavy chain CDR2
IWYDGSNK

SEQ ID NO: 11107 - protein, 8 aa, Homo sapiens
  Heavy chain CDR2
IWYDGRNK

SEQ ID NO: 11108 - protein, 8 aa, Homo sapiens
  Heavy chain CDR2
INWNGGST

SEQ ID NO: 11109 - protein, 8 aa, Homo sapiens
  Heavy chain CDR2
INWNGGST

SEQ ID NO: 11110 - protein, 8 aa, Homo sapiens
  Heavy chain CDR2
ISAYNGNT

SEQ ID NO: 11111 - protein, 8 aa, Homo sapiens
  Heavy chain CDR2
INWNGGNT

SEQ ID NO: 11112 - protein, 8 aa, Homo sapiens
  Heavy chain CDR2
ISAYNGNT

SEQ ID NO: 11113 - protein, 8 aa, Homo sapiens
  Heavy chain CDR2
ISVYNGNT

SEQ ID NO: 11114 - protein, 8 aa, Homo sapiens
  Heavy chain CDR2
IWYDGRNK

SEQ ID NO: 11115 - protein, 8 aa, Homo sapiens
  Heavy chain CDR2
IWYDGRNK

SEQ ID NO: 11116 - protein, 8 aa, Homo sapiens
  Heavy chain CDR2
INPSGGSS

SEQ ID NO: 11117 - protein, 8 aa, Homo sapiens
  Heavy chain CDR2
IWNDGSNK

SEQ ID NO: 11118 - protein, 8 aa, Homo sapiens
  Heavy chain CDR2
IWYDGRNK

SEQ ID NO: 11119 - protein, 8 aa, Homo sapiens
  Heavy chain CDR2
INPSGGSS

SEQ ID NO: 11120 - protein, 8 aa, Homo sapiens
  Heavy chain CDR2
ILYDGSNK

SEQ ID NO: 11121 - protein, 8 aa, Homo sapiens
  Heavy chain CDR2
IWYDGSNK

SEQ ID NO: 11122 - protein, 8 aa, Homo sapiens
  Heavy chain CDR2
IWYDGSNK

SEQ ID NO: 11123 - protein, 8 aa, Homo sapiens
  Heavy chain CDR2
IFYDGSNK

SEQ ID NO: 11124 - protein, 8 aa, Homo sapiens
  Heavy chain CDR2
ISAYNGNT

SEQ ID NO: 11125 - protein, 8 aa, Homo sapiens
  Heavy chain CDR2
IWYDGRNK

SEQ ID NO: 11126 - protein, 8 aa, Homo sapiens
  Heavy chain CDR2
ISAYNGNT

SEQ ID NO: 11127 - protein, 8 aa, Homo sapiens
  Heavy chain CDR2
ISAYNGNT

SEQ ID NO: 11128 - protein, 8 aa, Homo sapiens
  Heavy chain CDR2
IWYDGRNK

SEQ ID NO: 11129 - protein, 8 aa, Homo sapiens
  Heavy chain CDR2
INWNGGST

SEQ ID NO: 11130 - protein, 8 aa, Homo sapiens
  Heavy chain CDR2
INWNGGST

SEQ ID NO: 11131 - protein, 10 aa, Homo sapiens
  Heavy chain CDR2
IKSKTDGGTI

SEQ ID NO: 11132 - protein, 8 aa, Homo sapiens
  Heavy chain CDR2
IWNDGSNR

SEQ ID NO: 11133 - protein, 8 aa, Homo sapiens
  Heavy chain CDR2
IWYDGSNK

SEQ ID NO: 11134 - protein, 8 aa, Homo sapiens
  Heavy chain CDR2
IWNDGSNK

SEQ ID NO: 11135 - protein, 8 aa, Homo sapiens
  Heavy chain CDR2
INWNGGST

SEQ ID NO: 11136 - protein, 8 aa, Homo sapiens
  Heavy chain CDR2
IWNDGSNK

SEQ ID NO: 11137 - protein, 8 aa, Homo sapiens
  Heavy chain CDR2
IWYDGSNR

SEQ ID NO: 11138 - protein, 8 aa, Homo sapiens
  Heavy chain CDR2
IWNDGSNK

SEQ ID NO: 11139 - protein, 8 aa, Homo sapiens
  Heavy chain CDR2
IWYDGRNK

SEQ ID NO: 11140 - protein, 8 aa, Homo sapiens
  Heavy chain CDR2
IWYDGTIK

SEQ ID NO: 11141 - protein, 8 aa, Homo sapiens
  Heavy chain CDR2
IWYDGRNK

SEQ ID NO: 11142 - protein, 8 aa, Homo sapiens
  Heavy chain CDR2
IWYDGRNK

SEQ ID NO: 11143 - protein, 8 aa, Homo sapiens
  Heavy chain CDR2
IWYDGRNK

SEQ ID NO: 11144 - protein, 8 aa, Homo sapiens
  Heavy chain CDR2
INWNGGST

SEQ ID NO: 11145 - protein, 8 aa, Homo sapiens
  Heavy chain CDR2
ISVYNGNT

SEQ ID NO: 11146 - protein, 8 aa, Homo sapiens
  Heavy chain CDR2
INWNGGST

SEQ ID NO: 11147 - protein, 8 aa, Homo sapiens
  Heavy chain CDR2
IWYDGRNK

SEQ ID NO: 11148 - protein, 8 aa, Homo sapiens
  Heavy chain CDR2
IWYDGRNK

SEQ ID NO: 11149 - protein, 8 aa, Homo sapiens
  Heavy chain CDR2
ISAYNGNT

SEQ ID NO: 11150 - protein, 8 aa, Homo sapiens
  Heavy chain CDR2
IWYDGRNK

SEQ ID NO: 11151 - protein, 8 aa, Homo sapiens
  Heavy chain CDR2
IWYDGRNK

SEQ ID NO: 11152 - protein, 8 aa, Homo sapiens
  Heavy chain CDR2
INWNGGTT

SEQ ID NO: 11153 - protein, 8 aa, Homo sapiens
  Heavy chain CDR2
IWYDGSNK

SEQ ID NO: 11154 - protein, 8 aa, Homo sapiens
  Heavy chain CDR2
IWYDGSNK

SEQ ID NO: 11155 - protein, 8 aa, Homo sapiens
  Heavy chain CDR2
IWYDGRNK

SEQ ID NO: 11156 - protein, 8 aa, Homo sapiens
  Heavy chain CDR2
INWNGGST

SEQ ID NO: 11157 - protein, 8 aa, Homo sapiens
  Heavy chain CDR2
INWNGGST

SEQ ID NO: 11158 - protein, 8 aa, Homo sapiens
  Heavy chain CDR2
IWYDGSNK

SEQ ID NO: 11159 - protein, 8 aa, Homo sapiens
  Heavy chain CDR2
ISAYNGNT

SEQ ID NO: 11160 - protein, 10 aa, Homo sapiens
  Heavy chain CDR2
IKSKTDGGTI

SEQ ID NO: 11161 - protein, 8 aa, Homo sapiens
  Heavy chain CDR2
VNPSGGTS

SEQ ID NO: 11162 - protein, 8 aa, Homo sapiens
  Heavy chain CDR2
VNPSSGST

SEQ ID NO: 11163 - protein, 8 aa, Homo sapiens
  Heavy chain CDR2
ISVYNGNT

SEQ ID NO: 11164 - protein, 8 aa, Homo sapiens
  Heavy chain CDR2
IWYDGRNK

SEQ ID NO: 11165 - protein, 8 aa, Homo sapiens
  Heavy chain CDR2
IFYDGSNN

SEQ ID NO: 11166 - protein, 8 aa, Homo sapiens
  Heavy chain CDR2
INWNGGNT

SEQ ID NO: 11167 - protein, 8 aa, Homo sapiens
  Heavy chain CDR2
VNPSSGST

SEQ ID NO: 11168 - protein, 8 aa, Homo sapiens
  Heavy chain CDR2
INWNGGNT

SEQ ID NO: 11169 - protein, 8 aa, Homo sapiens
  Heavy chain CDR2
ISAYNGNT

SEQ ID NO: 11170 - protein, 8 aa, Homo sapiens
  Heavy chain CDR2
INPSGGST

SEQ ID NO: 11171 - protein, 8 aa, Homo sapiens
  Heavy chain CDR2
IWNDGSNR

SEQ ID NO: 11172 - protein, 8 aa, Homo sapiens
  Heavy chain CDR2
IWYDGNHK

SEQ ID NO: 11173 - protein, 8 aa, Homo sapiens
  Heavy chain CDR2
IWYDGRNK

SEQ ID NO: 11174 - protein, 8 aa, Homo sapiens
  Heavy chain CDR2
INWNGGST

SEQ ID NO: 11175 - protein, 8 aa, Homo sapiens
  Heavy chain CDR2
INWNGGNT

SEQ ID NO: 11176 - protein, 8 aa, Homo sapiens
  Heavy chain CDR2
IWYDGTIK

SEQ ID NO: 11177 - protein, 8 aa, Homo sapiens
  Heavy chain CDR2
TWYDGSNK

SEQ ID NO: 11178 - protein, 8 aa, Homo sapiens
  Heavy chain CDR2
INWNGGNT

SEQ ID NO: 11179 - protein, 8 aa, Homo sapiens
  Heavy chain CDR2
IWYDGRNK

SEQ ID NO: 11180 - protein, 8 aa, Homo sapiens
  Heavy chain CDR2
INPSGGSS

SEQ ID NO: 11181 - protein, 8 aa, Homo sapiens
  Heavy chain CDR2
IWYDGRNK

SEQ ID NO: 11182 - protein, 8 aa, Homo sapiens
  Heavy chain CDR2
IWYDGRNK

SEQ ID NO: 11183 - protein, 8 aa, Homo sapiens
  Heavy chain CDR2
IWYDGNNK

SEQ ID NO: 11184 - protein, 8 aa, Homo sapiens
  Heavy chain CDR2
ISAYNGNT

SEQ ID NO: 11185 - protein, 8 aa, Homo sapiens
  Heavy chain CDR2
INWNGGNT

SEQ ID NO: 11186 - protein, 8 aa, Homo sapiens
  Heavy chain CDR2
ISVYNGNT

SEQ ID NO: 11187 - protein, 8 aa, Homo sapiens
  Heavy chain CDR2
IFYDGSNN

SEQ ID NO: 11188 - protein, 8 aa, Homo sapiens
  Heavy chain CDR2
IWYDGRNK

SEQ ID NO: 11189 - protein, 8 aa, Homo sapiens
  Heavy chain CDR2
INWNGGNT

SEQ ID NO: 11190 - protein, 8 aa, Homo sapiens
  Heavy chain CDR2
INWNGGST

SEQ ID NO: 11191 - protein, 8 aa, Homo sapiens
  Heavy chain CDR2
INPSSGGS

SEQ ID NO: 11192 - protein, 8 aa, Homo sapiens
  Heavy chain CDR2
IWYDGNNK

SEQ ID NO: 11193 - protein, 8 aa, Homo sapiens
  Heavy chain CDR2
IWNDGSNK

SEQ ID NO: 11194 - protein, 8 aa, Homo sapiens
  Heavy chain CDR2
IWYDGRNK

SEQ ID NO: 11195 - protein, 8 aa, Homo sapiens
  Heavy chain CDR2
ISAYNGNT

SEQ ID NO: 11196 - protein, 8 aa, Homo sapiens
  Heavy chain CDR2
IWYDGNNK

SEQ ID NO: 11197 - protein, 8 aa, Homo sapiens
  Heavy chain CDR2
INWNGGST

SEQ ID NO: 11198 - protein, 8 aa, Homo sapiens
  Heavy chain CDR2
INWNGGST

SEQ ID NO: 11199 - protein, 8 aa, Homo sapiens
  Heavy chain CDR2
INWNGGNT

SEQ ID NO: 11200 - protein, 8 aa, Homo sapiens
  Heavy chain CDR2
INWNGGST

SEQ ID NO: 11201 - protein, 8 aa, Homo sapiens
  Heavy chain CDR2
ISAYNGNT

SEQ ID NO: 11202 - protein, 8 aa, Homo sapiens
  Heavy chain CDR2
INWNGGNT

SEQ ID NO: 11203 - protein, 8 aa, Homo sapiens
  Heavy chain CDR2
INWNGGNT

SEQ ID NO: 11204 - protein, 8 aa, Homo sapiens
  Heavy chain CDR2
INWNGGNT

SEQ ID NO: 11205 - protein, 8 aa, Homo sapiens
  Heavy chain CDR2
INWNGAST

SEQ ID NO: 11206 - protein, 8 aa, Homo sapiens
  Heavy chain CDR2
INWNGGNT

SEQ ID NO: 11207 - protein, 8 aa, Homo sapiens
  Heavy chain CDR2
IWNDGSNK

SEQ ID NO: 11208 - protein, 8 aa, Homo sapiens
  Heavy chain CDR2
INWNGGNT

SEQ ID NO: 11209 - protein, 8 aa, Homo sapiens
  Heavy chain CDR2
ISVYNGNT

SEQ ID NO: 11210 - protein, 8 aa, Homo sapiens
  Heavy chain CDR2
INWNGGST

SEQ ID NO: 11211 - protein, 8 aa, Homo sapiens
  Heavy chain CDR2
IWYDGGIK

SEQ ID NO: 11212 - protein, 8 aa, Homo sapiens
  Heavy chain CDR2
ISAYNGNT

SEQ ID NO: 11213 - protein, 8 aa, Homo sapiens
  Heavy chain CDR2
INWNGGNT

SEQ ID NO: 11214 - protein, 8 aa, Homo sapiens
  Heavy chain CDR2
ISAYNGNT

SEQ ID NO: 11215 - protein, 8 aa, Homo sapiens
  Heavy chain CDR2
TWYDGSNK

SEQ ID NO: 11216 - protein, 8 aa, Homo sapiens
  Heavy chain CDR2
ISAYNGNT

SEQ ID NO: 11217 - protein, 8 aa, Homo sapiens
  Heavy chain CDR2
IWYDGSNK

SEQ ID NO: 11218 - protein, 8 aa, Homo sapiens
  Heavy chain CDR2
ILYDGNNK

SEQ ID NO: 11219 - protein, 8 aa, Homo sapiens
  Heavy chain CDR2
IWYDGSNK

SEQ ID NO: 11220 - protein, 8 aa, Homo sapiens
  Heavy chain CDR2
IWYDGSNK

SEQ ID NO: 11221 - protein, 8 aa, Homo sapiens
  Heavy chain CDR2
IWYDGNNK

SEQ ID NO: 11222 - protein, 8 aa, Homo sapiens
  Heavy chain CDR2
IWYDGNNK

SEQ ID NO: 11223 - protein, 7 aa, Homo sapiens
  Heavy chain CDR2
IHYSGRT

SEQ ID NO: 11224 - protein, 8 aa, Homo sapiens
  Heavy chain CDR2
IWYDGNNK

SEQ ID NO: 11225 - protein, 8 aa, Homo sapiens
  Heavy chain CDR2
ISAYNGNT

SEQ ID NO: 11226 - protein, 8 aa, Homo sapiens
  Heavy chain CDR2
IWYDGSNK

SEQ ID NO: 11227 - protein, 8 aa, Homo sapiens
  Heavy chain CDR2
IWYDGSNK

SEQ ID NO: 11228 - protein, 8 aa, Homo sapiens
  Heavy chain CDR2
VWYDGSNK

SEQ ID NO: 11229 - protein, 8 aa, Homo sapiens
  Heavy chain CDR2
VWYDGSNK

SEQ ID NO: 11230 - protein, 8 aa, Homo sapiens
  Heavy chain CDR2
IWYDGSNR

SEQ ID NO: 11231 - protein, 8 aa, Homo sapiens
  Heavy chain CDR2
VWYDGSNK

SEQ ID NO: 11232 - protein, 8 aa, Homo sapiens
  Heavy chain CDR2
ISAYNGNT

SEQ ID NO: 11233 - protein, 8 aa, Homo sapiens
  Heavy chain CDR2
ISAYNGNT

SEQ ID NO: 11234 - protein, 8 aa, Homo sapiens
  Heavy chain CDR2
ISAYNGNT

SEQ ID NO: 11235 - protein, 8 aa, Homo sapiens
  Heavy chain CDR2
ISAYNGNT

SEQ ID NO: 11236 - protein, 8 aa, Homo sapiens
  Heavy chain CDR2
ISAYNGNT

SEQ ID NO: 11237 - protein, 8 aa, Homo sapiens
  Heavy chain CDR2
IWYDGRNK

SEQ ID NO: 11238 - protein, 8 aa, Homo sapiens
  Heavy chain CDR2
IWYDGSNK

SEQ ID NO: 11239 - protein, 8 aa, Homo sapiens
  Heavy chain CDR2
IWYDGSNK

SEQ ID NO: 11240 - protein, 8 aa, Homo sapiens
  Heavy chain CDR2
ISAYNGNT

SEQ ID NO: 11241 - protein, 8 aa, Homo sapiens
  Heavy chain CDR2
ISAYNGNT

SEQ ID NO: 11242 - protein, 8 aa, Homo sapiens
  Heavy chain CDR2
ISAYNGNT

SEQ ID NO: 11243 - protein, 8 aa, Homo sapiens
  Heavy chain CDR2
ISAYNGNT

SEQ ID NO: 11244 - protein, 8 aa, Homo sapiens
  Heavy chain CDR2
ILYDGNNK

SEQ ID NO: 11245 - protein, 8 aa, Homo sapiens
  Heavy chain CDR2
ISAYNGNT

SEQ ID NO: 11246 - protein, 8 aa, Homo sapiens
  Heavy chain CDR2
VWYDGSNK

SEQ ID NO: 11247 - protein, 8 aa, Homo sapiens
  Heavy chain CDR2
TWYDGSNK

SEQ ID NO: 11248 - protein, 8 aa, Homo sapiens
  Heavy chain CDR2
ISAYNGNT

SEQ ID NO: 11249 - protein, 8 aa, Homo sapiens
  Heavy chain CDR2
TWYDGSNK

SEQ ID NO: 11250 - protein, 8 aa, Homo sapiens
  Heavy chain CDR2
ISAYNGNT

SEQ ID NO: 11251 - protein, 8 aa, Homo sapiens
  Heavy chain CDR2
IWYDGSNK

SEQ ID NO: 11252 - protein, 8 aa, Homo sapiens
  Heavy chain CDR2
IWYDGSNK

SEQ ID NO: 11253 - protein, 8 aa, Homo sapiens
  Heavy chain CDR2
IWYDGSNK

SEQ ID NO: 11254 - protein, 8 aa, Homo sapiens
  Heavy chain CDR2
IWYDGSNK

SEQ ID NO: 11255 - protein, 8 aa, Homo sapiens
  Heavy chain CDR2
IWYDGNNK

SEQ ID NO: 11256 - protein, 8 aa, Homo sapiens
  Heavy chain CDR2
IWYEGRNK

SEQ ID NO: 11257 - protein, 8 aa, Homo sapiens
  Heavy chain CDR2
IWYDGSNK

SEQ ID NO: 11258 - protein, 8 aa, Homo sapiens
  Heavy chain CDR2
TWYDGSNK

SEQ ID NO: 11259 - protein, 8 aa, Homo sapiens
  Heavy chain CDR2
TWYDGRNK

SEQ ID NO: 11260 - protein, 8 aa, Homo sapiens
  Heavy chain CDR2
IWYDGSNK

SEQ ID NO: 11261 - protein, 8 aa, Homo sapiens
  Heavy chain CDR2
IWYDGSNK

SEQ ID NO: 11262 - protein, 8 aa, Homo sapiens
  Heavy chain CDR2
TWYDGSNK

SEQ ID NO: 11263 - protein, 8 aa, Homo sapiens
  Heavy chain CDR2
IWYDGSNK

SEQ ID NO: 11264 - protein, 8 aa, Homo sapiens
  Heavy chain CDR2
TWYDGSNK

SEQ ID NO: 11265 - protein, 8 aa, Homo sapiens
  Heavy chain CDR2
IWYDGSNK

SEQ ID NO: 11266 - protein, 8 aa, Homo sapiens
  Heavy chain CDR2
IWYDGNNK

SEQ ID NO: 11267 - protein, 8 aa, Homo sapiens
  Heavy chain CDR2
VWYDGNNK

SEQ ID NO: 11268 - protein, 8 aa, Homo sapiens
  Heavy chain CDR2
IWYDGSNK

SEQ ID NO: 11269 - protein, 8 aa, Homo sapiens
  Heavy chain CDR2
TWYDGSNK

SEQ ID NO: 11270 - protein, 8 aa, Homo sapiens
  Heavy chain CDR2
IWYDGSNK

SEQ ID NO: 11271 - protein, 8 aa, Homo sapiens
  Heavy chain CDR2
IWYEGSNK

SEQ ID NO: 11272 - protein, 8 aa, Homo sapiens
  Heavy chain CDR2
KWYDGSNK

SEQ ID NO: 11273 - protein, 8 aa, Homo sapiens
  Heavy chain CDR2
IWYDGSNK

SEQ ID NO: 11274 - protein, 8 aa, Homo sapiens
  Heavy chain CDR2
TWYDGNNK

SEQ ID NO: 11275 - protein, 8 aa, Homo sapiens
  Heavy chain CDR2
IWYDGSNK

SEQ ID NO: 11276 - protein, 8 aa, Homo sapiens
  Heavy chain CDR2
IWYDGSNK

SEQ ID NO: 11277 - protein, 8 aa, Homo sapiens
  Heavy chain CDR2
TWYNGRNK

SEQ ID NO: 11278 - protein, 8 aa, Homo sapiens
  Heavy chain CDR2
VWYDGNNK

SEQ ID NO: 11279 - protein, 8 aa, Homo sapiens
  Heavy chain CDR2
VWYDGNNK

SEQ ID NO: 11280 - protein, 7 aa, Homo sapiens
  Heavy chain CDR2
IHYSGRT

SEQ ID NO: 11281 - protein, 8 aa, Homo sapiens
  Heavy chain CDR2
IWYDGSNK

SEQ ID NO: 11282 - protein, 8 aa, Homo sapiens
  Heavy chain CDR2
ISGSGGGT

SEQ ID NO: 11283 - protein, 8 aa, Homo sapiens
  Heavy chain CDR2
TWYNGRNK

SEQ ID NO: 11284 - protein, 8 aa, Homo sapiens
  Heavy chain CDR2
ISYDGSKK

SEQ ID NO: 11285 - protein, 8 aa, Homo sapiens
  Heavy chain CDR2
TWYDGRNK

SEQ ID NO: 11286 - protein, 8 aa, Homo sapiens
  Heavy chain CDR2
IWYDGSNK

SEQ ID NO: 11287 - protein, 8 aa, Homo sapiens
  Heavy chain CDR2
TWYDGSNK

SEQ ID NO: 11288 - protein, 7 aa, Homo sapiens
  Heavy chain CDR2
IYYSGRT

SEQ ID NO: 11289 - protein, 8 aa, Homo sapiens
  Heavy chain CDR2
IWYDGSNK

SEQ ID NO: 11290 - protein, 8 aa, Homo sapiens
  Heavy chain CDR2
IWYDGRNK

SEQ ID NO: 11291 - protein, 8 aa, Homo sapiens
  Heavy chain CDR2
ISYDGSNK

SEQ ID NO: 11292 - protein, 8 aa, Homo sapiens
  Heavy chain CDR2
ISYDGSHK

SEQ ID NO: 11293 - protein, 8 aa, Homo sapiens
  Heavy chain CDR2
ISYDGSNK

SEQ ID NO: 11294 - protein, 8 aa, Homo sapiens
  Heavy chain CDR2
IKQDGSEK

SEQ ID NO: 11295 - protein, 8 aa, Homo sapiens
  Heavy chain CDR2
IWYDGNNK

SEQ ID NO: 11296 - protein, 7 aa, Homo sapiens
  Heavy chain CDR2
IYYSGST

SEQ ID NO: 11297 - protein, 8 aa, Homo sapiens
  Heavy chain CDR2
IWYDGSNK

SEQ ID NO: 11298 - protein, 8 aa, Homo sapiens
  Heavy chain CDR2
IWYDGSNK

SEQ ID NO: 11299 - protein, 8 aa, Homo sapiens
  Heavy chain CDR2
IWYDGNNK

SEQ ID NO: 11300 - protein, 8 aa, Homo sapiens
  Heavy chain CDR2
ISAYNGNT

SEQ ID NO: 11301 - protein, 8 aa, Homo sapiens
  Heavy chain CDR2
VWYDGNNK

SEQ ID NO: 11302 - protein, 8 aa, Homo sapiens
  Heavy chain CDR2
IWYDGSNK

SEQ ID NO: 11303 - protein, 8 aa, Homo sapiens
  Heavy chain CDR2
IWYDGNNK

SEQ ID NO: 11304 - protein, 8 aa, Homo sapiens
  Heavy chain CDR2
ISVYNGNT

SEQ ID NO: 11305 - protein, 8 aa, Homo sapiens
  Heavy chain CDR2
LWYDGSNN

SEQ ID NO: 11306 - protein, 8 aa, Homo sapiens
  Heavy chain CDR2
VWYDGNNK

SEQ ID NO: 11307 - protein, 9 aa, Homo sapiens
  Heavy chain CDR2
TYYRSKWYN

SEQ ID NO: 11308 - protein, 10 aa, Homo sapiens
  Heavy chain CDR2
IRSKTYGGTT

SEQ ID NO: 11309 - protein, 8 aa, Homo sapiens
  Heavy chain CDR2
IWYDGSNK

SEQ ID NO: 11310 - protein, 8 aa, Homo sapiens
  Heavy chain CDR2
ISAYNGNT

SEQ ID NO: 11311 - protein, 8 aa, Homo sapiens
  Heavy chain CDR2
TWYDGSNK

SEQ ID NO: 11312 - protein, 8 aa, Homo sapiens
  Heavy chain CDR2
IWYDGNNK

SEQ ID NO: 11313 - protein, 7 aa, Homo sapiens
  Heavy chain CDR2
IYHSGST

SEQ ID NO: 11314 - protein, 8 aa, Homo sapiens
  Heavy chain CDR2
IWYDGSNK

SEQ ID NO: 11315 - protein, 8 aa, Homo sapiens
  Heavy chain CDR2
TWYDGSNK

SEQ ID NO: 11316 - protein, 8 aa, Homo sapiens
  Heavy chain CDR2
TWYDGRNK

SEQ ID NO: 11317 - protein, 8 aa, Homo sapiens
  Heavy chain CDR2
TWYDGSNK

SEQ ID NO: 11318 - protein, 8 aa, Homo sapiens
  Heavy chain CDR2
IWYDGSNK

SEQ ID NO: 11319 - protein, 8 aa, Homo sapiens
  Heavy chain CDR2
ISYDGSHK

SEQ ID NO: 11320 - protein, 8 aa, Homo sapiens
  Heavy chain CDR2
TWYNGRNK

SEQ ID NO: 11321 - protein, 8 aa, Homo sapiens
  Heavy chain CDR2
MWYDGSNK

SEQ ID NO: 11322 - protein, 8 aa, Homo sapiens
  Heavy chain CDR2
IWYDGSNK

SEQ ID NO: 11323 - protein, 8 aa, Homo sapiens
  Heavy chain CDR2
IWYDGSNK

SEQ ID NO: 11324 - protein, 8 aa, Homo sapiens
  Heavy chain CDR2
ISAYNGNT

SEQ ID NO: 11325 - protein, 8 aa, Homo sapiens
  Heavy chain CDR2
IWYDGSNK

SEQ ID NO: 11326 - protein, 8 aa, Homo sapiens
  Heavy chain CDR2
TWYDGSNK

SEQ ID NO: 11327 - protein, 8 aa, Homo sapiens
  Heavy chain CDR2
IWYDGSNK

SEQ ID NO: 11328 - protein, 8 aa, Homo sapiens
  Heavy chain CDR2
IWYDGSNK

SEQ ID NO: 11329 - protein, 8 aa, Homo sapiens
  Heavy chain CDR2
IWYDGSNK

SEQ ID NO: 11330 - protein, 8 aa, Homo sapiens
  Heavy chain CDR2
IWYDGSNK

SEQ ID NO: 11331 - protein, 8 aa, Homo sapiens
  Heavy chain CDR2
IWYDGSNK

SEQ ID NO: 11332 - protein, 8 aa, Homo sapiens
  Heavy chain CDR2
IWYDGSNK

SEQ ID NO: 11333 - protein, 8 aa, Homo sapiens
  Heavy chain CDR2
IWYDGSNK

SEQ ID NO: 11334 - protein, 8 aa, Homo sapiens
  Heavy chain CDR2
MWYDGSNK

SEQ ID NO: 11335 - protein, 8 aa, Homo sapiens
  Heavy chain CDR2
IWYDGSNK

SEQ ID NO: 11336 - protein, 8 aa, Homo sapiens
  Heavy chain CDR2
IWYDGSNK

SEQ ID NO: 11337 - protein, 8 aa, Homo sapiens
  Heavy chain CDR2
VWYDGNHK

SEQ ID NO: 11338 - protein, 8 aa, Homo sapiens
  Heavy chain CDR2
IWYDGSNK

SEQ ID NO: 11339 - protein, 8 aa, Homo sapiens
  Heavy chain CDR2
IWYDGNNR

SEQ ID NO: 11340 - protein, 8 aa, Homo sapiens
  Heavy chain CDR2
IWYDGSNK

SEQ ID NO: 11341 - protein, 8 aa, Homo sapiens
  Heavy chain CDR2
TWYDGSNK

SEQ ID NO: 11342 - protein, 8 aa, Homo sapiens
  Heavy chain CDR2
IWYDGSNK

SEQ ID NO: 11343 - protein, 8 aa, Homo sapiens
  Heavy chain CDR2
IWYDGSNK

SEQ ID NO: 11344 - protein, 8 aa, Homo sapiens
  Heavy chain CDR2
IWYDGSNK

SEQ ID NO: 11345 - protein, 8 aa, Homo sapiens
  Heavy chain CDR2
IWYDGSNK

SEQ ID NO: 11346 - protein, 8 aa, Homo sapiens
  Heavy chain CDR2
TWYDGSNK

SEQ ID NO: 11347 - protein, 8 aa, Homo sapiens
  Heavy chain CDR2
TWYDGSNK

SEQ ID NO: 11348 - protein, 8 aa, Homo sapiens
  Heavy chain CDR2
IWYDGSNK

SEQ ID NO: 11349 - protein, 8 aa, Homo sapiens
  Heavy chain CDR2
TWYDGSNK

SEQ ID NO: 11350 - protein, 8 aa, Homo sapiens
  Heavy chain CDR2
IWYDGRNK

SEQ ID NO: 11351 - protein, 8 aa, Homo sapiens
  Heavy chain CDR2
IWYDGRNK

SEQ ID NO: 11352 - protein, 8 aa, Homo sapiens
  Heavy chain CDR2
NWYDGSNK

SEQ ID NO: 11353 - protein, 8 aa, Homo sapiens
  Heavy chain CDR2
IWYEGRNK

SEQ ID NO: 11354 - protein, 8 aa, Homo sapiens
  Heavy chain CDR2
ISAYNGNT

SEQ ID NO: 11355 - protein, 8 aa, Homo sapiens
  Heavy chain CDR2
IWYDGSNK

SEQ ID NO: 11356 - protein, 8 aa, Homo sapiens
  Heavy chain CDR2
ISGGGLST

SEQ ID NO: 11357 - protein, 8 aa, Homo sapiens
  Heavy chain CDR2
IWYDGRNK

SEQ ID NO: 11358 - protein, 8 aa, Homo sapiens
  Heavy chain CDR2
IWYDGSNK

SEQ ID NO: 11359 - protein, 8 aa, Homo sapiens
  Heavy chain CDR2
IWYEGSNK

SEQ ID NO: 11360 - protein, 8 aa, Homo sapiens
  Heavy chain CDR2
IWYEGRNK

SEQ ID NO: 11361 - protein, 8 aa, Homo sapiens
  Heavy chain CDR2
ISGSGGST

SEQ ID NO: 11362 - protein, 8 aa, Homo sapiens
  Heavy chain CDR2
IWYDGSNK

SEQ ID NO: 11363 - protein, 8 aa, Homo sapiens
  Heavy chain CDR2
IWYDGSNK

SEQ ID NO: 11364 - protein, 8 aa, Homo sapiens
  Heavy chain CDR2
ISVYNGNT

SEQ ID NO: 11365 - protein, 8 aa, Homo sapiens
  Heavy chain CDR2
IWYDGRNK

SEQ ID NO: 11366 - protein, 8 aa, Homo sapiens
  Heavy chain CDR2
IWYDGSNR

SEQ ID NO: 11367 - protein, 8 aa, Homo sapiens
  Heavy chain CDR2
IWYEGSNK

SEQ ID NO: 11368 - protein, 8 aa, Homo sapiens
  Heavy chain CDR2
IWYDGSYK

SEQ ID NO: 11369 - protein, 8 aa, Homo sapiens
  Heavy chain CDR2
ISAYNGNT

SEQ ID NO: 11370 - protein, 8 aa, Homo sapiens
  Heavy chain CDR2
ISAYNGNT

SEQ ID NO: 11371 - protein, 8 aa, Homo sapiens
  Heavy chain CDR2
IWYDGNNK

SEQ ID NO: 11372 - protein, 8 aa, Homo sapiens
  Heavy chain CDR2
IWYDGNNK

SEQ ID NO: 11373 - protein, 8 aa, Homo sapiens
  Heavy chain CDR2
IWYDGSNR

SEQ ID NO: 11374 - protein, 8 aa, Homo sapiens
  Heavy chain CDR2
ISAYNGNT

SEQ ID NO: 11375 - protein, 8 aa, Homo sapiens
  Heavy chain CDR2
IWYDGRNK

SEQ ID NO: 11376 - protein, 8 aa, Homo sapiens
  Heavy chain CDR2
IWYDGRNK

SEQ ID NO: 11377 - protein, 8 aa, Homo sapiens
  Heavy chain CDR2
IWYDGSNK

SEQ ID NO: 11378 - protein, 8 aa, Homo sapiens
  Heavy chain CDR2
SWYDGSNK

SEQ ID NO: 11379 - protein, 8 aa, Homo sapiens
  Heavy chain CDR2
IWYDGRNK

SEQ ID NO: 11380 - protein, 8 aa, Homo sapiens
  Heavy chain CDR2
ISAYNGNT

SEQ ID NO: 11381 - protein, 8 aa, Homo sapiens
  Heavy chain CDR2
ISAYNGNT

SEQ ID NO: 11382 - protein, 8 aa, Homo sapiens
  Heavy chain CDR2
IWYDGSNK

SEQ ID NO: 11383 - protein, 8 aa, Homo sapiens
  Heavy chain CDR2
IWYDGRNK

SEQ ID NO: 11384 - protein, 8 aa, Homo sapiens
  Heavy chain CDR2
VLYDGNNK

SEQ ID NO: 11385 - protein, 8 aa, Homo sapiens
  Heavy chain CDR2
IWYDGRNK

SEQ ID NO: 11386 - protein, 8 aa, Homo sapiens
  Heavy chain CDR2
IWYDGSNK

SEQ ID NO: 11387 - protein, 8 aa, Homo sapiens
  Heavy chain CDR2
ISAYNGNT

SEQ ID NO: 11388 - protein, 8 aa, Homo sapiens
  Heavy chain CDR2
IWYDGRNK

SEQ ID NO: 11389 - protein, 8 aa, Homo sapiens
  Heavy chain CDR2
IWYDGNNK

SEQ ID NO: 11390 - protein, 8 aa, Homo sapiens
  Heavy chain CDR2
IWYDGRNK

SEQ ID NO: 11391 - protein, 8 aa, Homo sapiens
  Heavy chain CDR2
IWYDGNNK

SEQ ID NO: 11392 - protein, 8 aa, Homo sapiens
  Heavy chain CDR2
IWYDVGNK

SEQ ID NO: 11393 - protein, 8 aa, Homo sapiens
  Heavy chain CDR2
IWYDGSNK

SEQ ID NO: 11394 - protein, 8 aa, Homo sapiens
  Heavy chain CDR2
ISAYNGNT

SEQ ID NO: 11395 - protein, 8 aa, Homo sapiens
  Heavy chain CDR2
IWYDGINK

SEQ ID NO: 11396 - protein, 8 aa, Homo sapiens
  Heavy chain CDR2
IWYDGRNK

SEQ ID NO: 11397 - protein, 8 aa, Homo sapiens
  Heavy chain CDR2
ISVYNGNT

SEQ ID NO: 11398 - protein, 8 aa, Homo sapiens
  Heavy chain CDR2
SWYDGSNK

SEQ ID NO: 11399 - protein, 8 aa, Homo sapiens
  Heavy chain CDR2
IWYDGSNK

SEQ ID NO: 11400 - protein, 8 aa, Homo sapiens
  Heavy chain CDR2
ISVYNGNT

SEQ ID NO: 11401 - protein, 8 aa, Homo sapiens
  Heavy chain CDR2
ISAYNGNT

SEQ ID NO: 11402 - protein, 8 aa, Homo sapiens
  Heavy chain CDR2
IWYDGRNK

SEQ ID NO: 11403 - protein, 8 aa, Homo sapiens
  Heavy chain CDR2
NWYDGSNK

SEQ ID NO: 11404 - protein, 8 aa, Homo sapiens
  Heavy chain CDR2
IWYDGSNK

SEQ ID NO: 11405 - protein, 8 aa, Homo sapiens
  Heavy chain CDR2
ISAYNGNT

SEQ ID NO: 11406 - protein, 8 aa, Homo sapiens
  Heavy chain CDR2
ISAYNGNT

SEQ ID NO: 11407 - protein, 8 aa, Homo sapiens
  Heavy chain CDR2
ISAYNGNT

SEQ ID NO: 11408 - protein, 8 aa, Homo sapiens
  Heavy chain CDR2
IWYDGNNK

SEQ ID NO: 11409 - protein, 8 aa, Homo sapiens
  Heavy chain CDR2
IWYDGRNK

SEQ ID NO: 11410 - protein, 8 aa, Homo sapiens
  Heavy chain CDR2
IWYDGSNK

SEQ ID NO: 11411 - protein, 8 aa, Homo sapiens
  Heavy chain CDR2
ISAYNGNT

SEQ ID NO: 11412 - protein, 8 aa, Homo sapiens
  Heavy chain CDR2
TWYDGSNK

SEQ ID NO: 11413 - protein, 8 aa, Homo sapiens
  Heavy chain CDR2
ISAYNGNT

SEQ ID NO: 11414 - protein, 8 aa, Homo sapiens
  Heavy chain CDR2
IWYDGSNR

SEQ ID NO: 11415 - protein, 8 aa, Homo sapiens
  Heavy chain CDR2
IWYDGRNK

SEQ ID NO: 11416 - protein, 8 aa, Homo sapiens
  Heavy chain CDR2
ISAYNGNT

SEQ ID NO: 11417 - protein, 8 aa, Homo sapiens
  Heavy chain CDR2
IWYDGRNK

SEQ ID NO: 11418 - protein, 8 aa, Homo sapiens
  Heavy chain CDR2
IWYDGSYK

SEQ ID NO: 11419 - protein, 8 aa, Homo sapiens
  Heavy chain CDR2
IWYEGRNK

SEQ ID NO: 11420 - protein, 8 aa, Homo sapiens
  Heavy chain CDR2
IWYDGRNK

SEQ ID NO: 11421 - protein, 8 aa, Homo sapiens
  Heavy chain CDR2
IWYDGRNK

SEQ ID NO: 11422 - protein, 8 aa, Homo sapiens
  Heavy chain CDR2
IWYDGSNK

SEQ ID NO: 11423 - protein, 8 aa, Homo sapiens
  Heavy chain CDR2
IWYDGRNK

SEQ ID NO: 11424 - protein, 8 aa, Homo sapiens
  Heavy chain CDR2
ISYDGSNK

SEQ ID NO: 11425 - protein, 8 aa, Homo sapiens
  Heavy chain CDR2
IWYDGRNK

SEQ ID NO: 11426 - protein, 8 aa, Homo sapiens
  Heavy chain CDR2
IWYDGRNK

SEQ ID NO: 11427 - protein, 8 aa, Homo sapiens
  Heavy chain CDR2
IWYDGRNK

SEQ ID NO: 11428 - protein, 8 aa, Homo sapiens
  Heavy chain CDR2
IWYEGRNK

SEQ ID NO: 11429 - protein, 8 aa, Homo sapiens
  Heavy chain CDR2
IWYDGRNK

SEQ ID NO: 11430 - protein, 8 aa, Homo sapiens
  Heavy chain CDR2
IWYDGSNK

SEQ ID NO: 11431 - protein, 8 aa, Homo sapiens
  Heavy chain CDR2
ISAYNGNT

SEQ ID NO: 11432 - protein, 8 aa, Homo sapiens
  Heavy chain CDR2
IWYDGRNK

SEQ ID NO: 11433 - protein, 8 aa, Homo sapiens
  Heavy chain CDR2
IWFDGNNK

SEQ ID NO: 11434 - protein, 8 aa, Homo sapiens
  Heavy chain CDR2
IWYDGRNK

SEQ ID NO: 11435 - protein, 8 aa, Homo sapiens
  Heavy chain CDR2
IWYEGRNK

SEQ ID NO: 11436 - protein, 8 aa, Homo sapiens
  Heavy chain CDR2
INPSVGST

SEQ ID NO: 11437 - protein, 8 aa, Homo sapiens
  Heavy chain CDR2
INPSVGST

SEQ ID NO: 11438 - protein, 7 aa, Homo sapiens
  Heavy chain CDR2
IYYSGST

SEQ ID NO: 11439 - protein, 8 aa, Homo sapiens
  Heavy chain CDR2
IWYDGRNK

SEQ ID NO: 11440 - protein, 8 aa, Homo sapiens
  Heavy chain CDR2
IWYDGSNK

SEQ ID NO: 11441 - protein, 8 aa, Homo sapiens
  Heavy chain CDR2
IWYEGSNK

SEQ ID NO: 11442 - protein, 8 aa, Homo sapiens
  Heavy chain CDR2
IWYDGSNK

SEQ ID NO: 11443 - protein, 8 aa, Homo sapiens
  Heavy chain CDR2
IWYDGSNK

SEQ ID NO: 11444 - protein, 8 aa, Homo sapiens
  Heavy chain CDR2
IWYDGSNK

SEQ ID NO: 11445 - protein, 8 aa, Homo sapiens
  Heavy chain CDR2
IWYDGRNK

SEQ ID NO: 11446 - protein, 8 aa, Homo sapiens
  Heavy chain CDR2
ISAYNGNT

SEQ ID NO: 11447 - protein, 8 aa, Homo sapiens
  Heavy chain CDR2
VWYDGSNK

SEQ ID NO: 11448 - protein, 8 aa, Homo sapiens
  Heavy chain CDR2
IWYDGRNK

SEQ ID NO: 11449 - protein, 8 aa, Homo sapiens
  Heavy chain CDR2
IWYDGSYT

SEQ ID NO: 11450 - protein, 8 aa, Homo sapiens
  Heavy chain CDR2
NWYDGSNK

SEQ ID NO: 11451 - protein, 8 aa, Homo sapiens
  Heavy chain CDR2
IWYDGRNK

SEQ ID NO: 11452 - protein, 8 aa, Homo sapiens
  Heavy chain CDR2
IWYDGRNK

SEQ ID NO: 11453 - protein, 7 aa, Homo sapiens
  Heavy chain CDR2
IYYRGNT

SEQ ID NO: 11454 - protein, 8 aa, Homo sapiens
  Heavy chain CDR2
IWYDGRNK

SEQ ID NO: 11455 - protein, 8 aa, Homo sapiens
  Heavy chain CDR2
ISAYNGNT

SEQ ID NO: 11456 - protein, 8 aa, Homo sapiens
  Heavy chain CDR2
IWYDGRNK

SEQ ID NO: 11457 - protein, 8 aa, Homo sapiens
  Heavy chain CDR2
ISAYNGNT

SEQ ID NO: 11458 - protein, 8 aa, Homo sapiens
  Heavy chain CDR2
IWYDGRNK

SEQ ID NO: 11459 - protein, 8 aa, Homo sapiens
  Heavy chain CDR2
IWYDGRNK

SEQ ID NO: 11460 - protein, 8 aa, Homo sapiens
  Heavy chain CDR2
IWYDGNNK

SEQ ID NO: 11461 - protein, 8 aa, Homo sapiens
  Heavy chain CDR2
IWYDGSYK

SEQ ID NO: 11462 - protein, 8 aa, Homo sapiens
  Heavy chain CDR2
IWYDGRNK

SEQ ID NO: 11463 - protein, 7 aa, Homo sapiens
  Heavy chain CDR2
IYYRGNT

SEQ ID NO: 11464 - protein, 8 aa, Homo sapiens
  Heavy chain CDR2
ISAYNGNT

SEQ ID NO: 11465 - protein, 8 aa, Homo sapiens
  Heavy chain CDR2
IWYDGRNK

SEQ ID NO: 11466 - protein, 8 aa, Homo sapiens
  Heavy chain CDR2
IWYDGRNK

SEQ ID NO: 11467 - protein, 8 aa, Homo sapiens
  Heavy chain CDR2
IWYEGRNK

SEQ ID NO: 11468 - protein, 8 aa, Homo sapiens
  Heavy chain CDR2
IWYDGSNK

SEQ ID NO: 11469 - protein, 8 aa, Homo sapiens
  Heavy chain CDR2
IWYDGRNK

SEQ ID NO: 11470 - protein, 8 aa, Homo sapiens
  Heavy chain CDR2
IWYDGRNK

SEQ ID NO: 11471 - protein, 8 aa, Homo sapiens
  Heavy chain CDR2
IWYDGRNK

SEQ ID NO: 11472 - protein, 15 aa, Homo sapiens
  Heavy chain CDR3
ARTLRYFDWLSSFDY

SEQ ID NO: 11473 - protein, 12 aa, Homo sapiens
  Heavy chain CDR3
ARRRIQLWSFDY

SEQ ID NO: 11474 - protein, 12 aa, Homo sapiens
  Heavy chain CDR3
ARRRIQLWSFDY

SEQ ID NO: 11475 - protein, 12 aa, Homo sapiens
  Heavy chain CDR3
ARRRIQLWSFDY

SEQ ID NO: 11476 - protein, 2 aa, Homo sapiens
  Heavy chain CDR3
AR

SEQ ID NO: 11477 - protein, 12 aa, Homo sapiens
  Heavy chain CDR3
ARRRIQLWSFDY

SEQ ID NO: 11478 - protein, 12 aa, Homo sapiens
  Heavy chain CDR3
ARRRIQLWSFDY

SEQ ID NO: 11479 - protein, 17 aa, Homo sapiens
  Heavy chain CDR3
AREGNWRNYYYYYGMDV

SEQ ID NO: 11480 - protein, 9 aa, Homo sapiens
  Heavy chain CDR3
TIIAAAGHY

SEQ ID NO: 11481 - protein, 8 aa, Homo sapiens
  Heavy chain CDR3
ARGWPSDY

SEQ ID NO: 11482 - protein, 12 aa, Homo sapiens
  Heavy chain CDR3
ARRRIQLWSFDY

SEQ ID NO: 11483 - protein, 13 aa, Homo sapiens
  Heavy chain CDR3
ARGDVDIVATFDY

SEQ ID NO: 11484 - protein, 12 aa, Homo sapiens
  Heavy chain CDR3
ARRRIQLWSFDY

SEQ ID NO: 11485 - protein, 17 aa, Homo sapiens
  Heavy chain CDR3
AREDNWRNYYYYYGMDV

SEQ ID NO: 11486 - protein, 12 aa, Homo sapiens
  Heavy chain CDR3
ARRRIQLWSFDY

SEQ ID NO: 11487 - protein, 12 aa, Homo sapiens
  Heavy chain CDR3
ARRRIQLWSFDY

SEQ ID NO: 11488 - protein, 18 aa, Homo sapiens
  Heavy chain CDR3
ARDQEYYYGSGSSNWFDP

SEQ ID NO: 11489 - protein, 9 aa, Homo sapiens
  Heavy chain CDR3
TIIAAAGHY

SEQ ID NO: 11490 - protein, 12 aa, Homo sapiens
  Heavy chain CDR3
ARRRIQLWSFDY

SEQ ID NO: 11491 - protein, 17 aa, Homo sapiens
  Heavy chain CDR3
AREDNWRNYYYYYGTDV

SEQ ID NO: 11492 - protein, 15 aa, Homo sapiens
  Heavy chain CDR3
ARTRRYFDWLSSFDY

SEQ ID NO: 11493 - protein, 8 aa, Homo sapiens
  Heavy chain CDR3
ARGWPSDY

SEQ ID NO: 11494 - protein, 9 aa, Homo sapiens
  Heavy chain CDR3
TIIAAAGHY

SEQ ID NO: 11495 - protein, 15 aa, Homo sapiens
  Heavy chain CDR3
ARALRYFDWLSSFDY

SEQ ID NO: 11496 - protein, 8 aa, Homo sapiens
  Heavy chain CDR3
ARRWPSDY

SEQ ID NO: 11497 - protein, 15 aa, Homo sapiens
  Heavy chain CDR3
ARPLRYFDWLSSFDY

SEQ ID NO: 11498 - protein, 17 aa, Homo sapiens
  Heavy chain CDR3
ASEDNWRNYYYYYGMDV

SEQ ID NO: 11499 - protein, 15 aa, Homo sapiens
  Heavy chain CDR3
ARPLTMVRGRAYFDY

SEQ ID NO: 11500 - protein, 17 aa, Homo sapiens
  Heavy chain CDR3
AREDNWRNYYYYYGMDV

SEQ ID NO: 11501 - protein, 15 aa, Homo sapiens
  Heavy chain CDR3
ARTLRYVDWLSSFDY

SEQ ID NO: 11502 - protein, 15 aa, Homo sapiens
  Heavy chain CDR3
ARERYSSSWYRAFDI

SEQ ID NO: 11503 - protein, 8 aa, Homo sapiens
  Heavy chain CDR3
ARGWPSDY

SEQ ID NO: 11504 - protein, 15 aa, Homo sapiens
  Heavy chain CDR3
ASTLRYFDWLSSFDY

SEQ ID NO: 11505 - protein, 15 aa, Homo sapiens
  Heavy chain CDR3
ARTVRYFDWLSSFDY

SEQ ID NO: 11506 - protein, 18 aa, Homo sapiens
  Heavy chain CDR3
ARGRAYYYGSGSYYNFDY

SEQ ID NO: 11507 - protein, 8 aa, Homo sapiens
  Heavy chain CDR3
ARGWPYDY

SEQ ID NO: 11508 - protein, 12 aa, Homo sapiens
  Heavy chain CDR3
ARRRIQLWSFDY

SEQ ID NO: 11509 - protein, 15 aa, Homo sapiens
  Heavy chain CDR3
AGTLRYFDWLSSFDY

SEQ ID NO: 11510 - protein, 9 aa, Homo sapiens
  Heavy chain CDR3
TIIAAAGHY

SEQ ID NO: 11511 - protein, 17 aa, Homo sapiens
  Heavy chain CDR3
AREDNWRNYYYSYGMDV

SEQ ID NO: 11512 - protein, 12 aa, Homo sapiens
  Heavy chain CDR3
ARRRIQLWSFDY

SEQ ID NO: 11513 - protein, 12 aa, Homo sapiens
  Heavy chain CDR3
ARRRIQLWSFDY

SEQ ID NO: 11514 - protein, 15 aa, Homo sapiens
  Heavy chain CDR3
ARTLRDFDWLSSFDY

SEQ ID NO: 11515 - protein, 12 aa, Homo sapiens
  Heavy chain CDR3
ARRRIQLWSFGY

SEQ ID NO: 11516 - protein, 17 aa, Homo sapiens
  Heavy chain CDR3
AREDNWRNYYYYYGMDV

SEQ ID NO: 11517 - protein, 17 aa, Homo sapiens
  Heavy chain CDR3
AREDNWRKYYYYYGMDV

SEQ ID NO: 11518 - protein, 12 aa, Homo sapiens
  Heavy chain CDR3
ARGDILTGYYGY

SEQ ID NO: 11519 - protein, 12 aa, Homo sapiens
  Heavy chain CDR3
VRGDILTGYYGY

SEQ ID NO: 11520 - protein, 11 aa, Homo sapiens
  Heavy chain CDR3
ARGGQLGHFDY

SEQ ID NO: 11521 - protein, 11 aa, Homo sapiens
  Heavy chain CDR3
ARVHQLGPFDY

SEQ ID NO: 11522 - protein, 11 aa, Homo sapiens
  Heavy chain CDR3
ARMVRGLIINY

SEQ ID NO: 11523 - protein, 11 aa, Homo sapiens
  Heavy chain CDR3
ARKGHLGPFDY

SEQ ID NO: 11524 - protein, 11 aa, Homo sapiens
  Heavy chain CDR3
ARGDLRGWFDP

SEQ ID NO: 11525 - protein, 14 aa, Homo sapiens
  Heavy chain CDR3
AREGGSGWYEYLDL

SEQ ID NO: 11526 - protein, 12 aa, Homo sapiens
  Heavy chain CDR3
GRGDILTGYYGY

SEQ ID NO: 11527 - protein, 11 aa, Homo sapiens
  Heavy chain CDR3
TRVDWWGVFDF

SEQ ID NO: 11528 - protein, 11 aa, Homo sapiens
  Heavy chain CDR3
ARGGQLGHFDF

SEQ ID NO: 11529 - protein, 11 aa, Homo sapiens
  Heavy chain CDR3
ARGGLIGPFDY

SEQ ID NO: 11530 - protein, 11 aa, Homo sapiens
  Heavy chain CDR3
ARAGILTGLDY

SEQ ID NO: 11531 - protein, 11 aa, Homo sapiens
  Heavy chain CDR3
ARKGHLGPFDY

SEQ ID NO: 11532 - protein, 12 aa, Homo sapiens
  Heavy chain CDR3
ARGDILTGYYSY

SEQ ID NO: 11533 - protein, 11 aa, Homo sapiens
  Heavy chain CDR3
ARVHLLGPFDY

SEQ ID NO: 11534 - protein, 13 aa, Homo sapiens
  Heavy chain CDR3
ARGLLWFGESLDY

SEQ ID NO: 11535 - protein, 11 aa, Homo sapiens
  Heavy chain CDR3
ARVPQLGPFDY

SEQ ID NO: 11536 - protein, 11 aa, Homo sapiens
  Heavy chain CDR3
TRVDWWGAFDF

SEQ ID NO: 11537 - protein, 14 aa, Homo sapiens
  Heavy chain CDR3
AREGGSGWYEYIDL

SEQ ID NO: 11538 - protein, 13 aa, Homo sapiens
  Heavy chain CDR3
SRGLLWFGESLDY

SEQ ID NO: 11539 - protein, 12 aa, Homo sapiens
  Heavy chain CDR3
ARGDILTGYYDY

SEQ ID NO: 11540 - protein, 12 aa, Homo sapiens
  Heavy chain CDR3
VRGDILTGYYSY

SEQ ID NO: 11541 - protein, 12 aa, Homo sapiens
  Heavy chain CDR3
VRGDILTGYYGY

SEQ ID NO: 11542 - protein, 11 aa, Homo sapiens
  Heavy chain CDR3
ARVHQLGPFDY

SEQ ID NO: 11543 - protein, 12 aa, Homo sapiens
  Heavy chain CDR3
VRGDILTGYYGY

SEQ ID NO: 11544 - protein, 12 aa, Homo sapiens
  Heavy chain CDR3
ARGDMLTGYYGY

SEQ ID NO: 11545 - protein, 11 aa, Homo sapiens
  Heavy chain CDR3
ARVHQLGPFDS

SEQ ID NO: 11546 - protein, 11 aa, Homo sapiens
  Heavy chain CDR3
ARVHQLGPFDY

SEQ ID NO: 11547 - protein, 12 aa, Homo sapiens
  Heavy chain CDR3
ARGDILTGYYGY

SEQ ID NO: 11548 - protein, 12 aa, Homo sapiens
  Heavy chain CDR3
ARGDILTGYYGS

SEQ ID NO: 11549 - protein, 11 aa, Homo sapiens
  Heavy chain CDR3
ARGGHLGHFDY

SEQ ID NO: 11550 - protein, 12 aa, Homo sapiens
  Heavy chain CDR3
VRGDILTGYYGY

SEQ ID NO: 11551 - protein, 11 aa, Homo sapiens
  Heavy chain CDR3
ARGGQLGHFDY

SEQ ID NO: 11552 - protein, 11 aa, Homo sapiens
  Heavy chain CDR3
ARGAILTGFDY

SEQ ID NO: 11553 - protein, 11 aa, Homo sapiens
  Heavy chain CDR3
ARKGQLGPFDY

SEQ ID NO: 11554 - protein, 12 aa, Homo sapiens
  Heavy chain CDR3
ARRSSSWYYFDY

SEQ ID NO: 11555 - protein, 14 aa, Homo sapiens
  Heavy chain CDR3
AREGGSGWYEYLDL

SEQ ID NO: 11556 - protein, 11 aa, Homo sapiens
  Heavy chain CDR3
ARKGQLGPFDY

SEQ ID NO: 11557 - protein, 11 aa, Homo sapiens
  Heavy chain CDR3
TRGDYFGFWDY

SEQ ID NO: 11558 - protein, 11 aa, Homo sapiens
  Heavy chain CDR3
ARKGQLGPFDY

SEQ ID NO: 11559 - protein, 16 aa, Homo sapiens
  Heavy chain CDR3
ARVSYYYGSGSYYFDY

SEQ ID NO: 11560 - protein, 20 aa, Homo sapiens
  Heavy chain CDR3
AGFYYGSGSRYYYYYYGMDV

SEQ ID NO: 11561 - protein, 14 aa, Homo sapiens
  Heavy chain CDR3
AREGGSGWYEYIDL

SEQ ID NO: 11562 - protein, 11 aa, Homo sapiens
  Heavy chain CDR3
ARVHQLGPFDY

SEQ ID NO: 11563 - protein, 12 aa, Homo sapiens
  Heavy chain CDR3
ARRSSSWYYFDY

SEQ ID NO: 11564 - protein, 16 aa, Homo sapiens
  Heavy chain CDR3
ARVSYYYGSGSYYFDY

SEQ ID NO: 11565 - protein, 11 aa, Homo sapiens
  Heavy chain CDR3
ARKGQLGSFDY

SEQ ID NO: 11566 - protein, 12 aa, Homo sapiens
  Heavy chain CDR3
ARRSSSWYYFDY

SEQ ID NO: 11567 - protein, 16 aa, Homo sapiens
  Heavy chain CDR3
ARVSYYYGSGSYYFDY

SEQ ID NO: 11568 - protein, 12 aa, Homo sapiens
  Heavy chain CDR3
ARRSSSWYYFYY

SEQ ID NO: 11569 - protein, 11 aa, Homo sapiens
  Heavy chain CDR3
ARGAILTGFDS

SEQ ID NO: 11570 - protein, 16 aa, Homo sapiens
  Heavy chain CDR3
ARVSYYYGSGSYYFDY

SEQ ID NO: 11571 - protein, 14 aa, Homo sapiens
  Heavy chain CDR3
ARDGGSGWYEYLDL

SEQ ID NO: 11572 - protein, 12 aa, Homo sapiens
  Heavy chain CDR3
ARRSSSWYYFDY

SEQ ID NO: 11573 - protein, 12 aa, Homo sapiens
  Heavy chain CDR3
ARRSSSWYYFDY

SEQ ID NO: 11574 - protein, 10 aa, Homo sapiens
  Heavy chain CDR3
AREKHWFFDL

SEQ ID NO: 11575 - protein, 16 aa, Homo sapiens
  Heavy chain CDR3
ARVSYYYGSGSYYFDY

SEQ ID NO: 11576 - protein, 16 aa, Homo sapiens
  Heavy chain CDR3
ARVSYSYGSGSYYFDY

SEQ ID NO: 11577 - protein, 12 aa, Homo sapiens
  Heavy chain CDR3
ARRSSGWYYFDY

SEQ ID NO: 11578 - protein, 11 aa, Homo sapiens
  Heavy chain CDR3
TRSGWYWYFDL

SEQ ID NO: 11579 - protein, 17 aa, Homo sapiens
  Heavy chain CDR3
AREDNWRNYYYYYGMDV

SEQ ID NO: 11580 - protein, 16 aa, Homo sapiens
  Heavy chain CDR3
ARVSYYYGSGSYYFDY

SEQ ID NO: 11581 - protein, 16 aa, Homo sapiens
  Heavy chain CDR3
ARVSYYYGSGSYYFDY

SEQ ID NO: 11582 - protein, 11 aa, Homo sapiens
  Heavy chain CDR3
ARGAIFTGFDY

SEQ ID NO: 11583 - protein, 20 aa, Homo sapiens
  Heavy chain CDR3
AGFYYGSGSRYYYYYYGMDV

SEQ ID NO: 11584 - protein, 16 aa, Homo sapiens
  Heavy chain CDR3
ARVSYYYGSGSYYFDY

SEQ ID NO: 11585 - protein, 11 aa, Homo sapiens
  Heavy chain CDR3
ARKGQLGPFDY

SEQ ID NO: 11586 - protein, 11 aa, Homo sapiens
  Heavy chain CDR3
ARGAILTGFDV

SEQ ID NO: 11587 - protein, 12 aa, Homo sapiens
  Heavy chain CDR3
ARGSSRYWYFDL

SEQ ID NO: 11588 - protein, 12 aa, Homo sapiens
  Heavy chain CDR3
ARRSSSWYYFDY

SEQ ID NO: 11589 - protein, 12 aa, Homo sapiens
  Heavy chain CDR3
ARRSSGWYYFDY

SEQ ID NO: 11590 - protein, 16 aa, Homo sapiens
  Heavy chain CDR3
ARVSYYYGSGSYYFDY

SEQ ID NO: 11591 - protein, 11 aa, Homo sapiens
  Heavy chain CDR3
ARKGQLGPFDS

SEQ ID NO: 11592 - protein, 12 aa, Homo sapiens
  Heavy chain CDR3
ARRSSSWYYFDY

SEQ ID NO: 11593 - protein, 11 aa, Homo sapiens
  Heavy chain CDR3
ARKGQLGPFDS

SEQ ID NO: 11594 - protein, 16 aa, Homo sapiens
  Heavy chain CDR3
ARVSYSYGSGSYYFDY

SEQ ID NO: 11595 - protein, 12 aa, Homo sapiens
  Heavy chain CDR3
ARRSSSWYYFDY

SEQ ID NO: 11596 - protein, 12 aa, Homo sapiens
  Heavy chain CDR3
ARRSSSWYYFDY

SEQ ID NO: 11597 - protein, 16 aa, Homo sapiens
  Heavy chain CDR3
ARVSYYYGSGSYYFDY

SEQ ID NO: 11598 - protein, 20 aa, Homo sapiens
  Heavy chain CDR3
AGFYYGSGSRYYYYYYGMDV

SEQ ID NO: 11599 - protein, 11 aa, Homo sapiens
  Heavy chain CDR3
ARNGQLGPFDY

SEQ ID NO: 11600 - protein, 21 aa, Homo sapiens
  Heavy chain CDR3
AGYYYGSGSPLYYYYYYGMDV

SEQ ID NO: 11601 - protein, 11 aa, Homo sapiens
  Heavy chain CDR3
ARKGQLGPFDY

SEQ ID NO: 11602 - protein, 12 aa, Homo sapiens
  Heavy chain CDR3
ARRSSSWYYFDY

SEQ ID NO: 11603 - protein, 11 aa, Homo sapiens
  Heavy chain CDR3
ARAGNWGPFDY

SEQ ID NO: 11604 - protein, 11 aa, Homo sapiens
  Heavy chain CDR3
VRDGWELLGDY

SEQ ID NO: 11605 - protein, 11 aa, Homo sapiens
  Heavy chain CDR3
ARDGWKLLDDY

SEQ ID NO: 11606 - protein, 9 aa, Homo sapiens
  Heavy chain CDR3
ARVGPPFDY

SEQ ID NO: 11607 - protein, 11 aa, Homo sapiens
  Heavy chain CDR3
VRDGWKLLDDY

SEQ ID NO: 11608 - protein, 11 aa, Homo sapiens
  Heavy chain CDR3
ARITGPYAFDI

SEQ ID NO: 11609 - protein, 10 aa, Homo sapiens
  Heavy chain CDR3
ARVGANWFDP

SEQ ID NO: 11610 - protein, 11 aa, Homo sapiens
  Heavy chain CDR3
ARGGLIGGFDY

SEQ ID NO: 11611 - protein, 11 aa, Homo sapiens
  Heavy chain CDR3
ARGGLLGGFDY

SEQ ID NO: 11612 - protein, 16 aa, Homo sapiens
  Heavy chain CDR3
ARDPPITMVRGAPFDY

SEQ ID NO: 11613 - protein, 13 aa, Homo sapiens
  Heavy chain CDR3
ARTYNWNDVGWDY

SEQ ID NO: 11614 - protein, 11 aa, Homo sapiens
  Heavy chain CDR3
ARGGLLGGFDY

SEQ ID NO: 11615 - protein, 16 aa, Homo sapiens
  Heavy chain CDR3
ARDPPITMVRGAPFDY

SEQ ID NO: 11616 - protein, 11 aa, Homo sapiens
  Heavy chain CDR3
ARGGLTGPFDY

SEQ ID NO: 11617 - protein, 11 aa, Homo sapiens
  Heavy chain CDR3
ARGGIWGYFDY

SEQ ID NO: 11618 - protein, 11 aa, Homo sapiens
  Heavy chain CDR3
VRGGIWGYFDY

SEQ ID NO: 11619 - protein, 11 aa, Homo sapiens
  Heavy chain CDR3
ARVGLLGGMDV

SEQ ID NO: 11620 - protein, 10 aa, Homo sapiens
  Heavy chain CDR3
ARVGASGVDY

SEQ ID NO: 11621 - protein, 11 aa, Homo sapiens
  Heavy chain CDR3
ARAGNWGPFDY

SEQ ID NO: 11622 - protein, 10 aa, Homo sapiens
  Heavy chain CDR3
ARVGSSGVDY

SEQ ID NO: 11623 - protein, 12 aa, Homo sapiens
  Heavy chain CDR3
ARGPSGPYEGDY

SEQ ID NO: 11624 - protein, 11 aa, Homo sapiens
  Heavy chain CDR3
ARAGILGGMDV

SEQ ID NO: 11625 - protein, 11 aa, Homo sapiens
  Heavy chain CDR3
TRDGWRLLDDY

SEQ ID NO: 11626 - protein, 11 aa, Homo sapiens
  Heavy chain CDR3
VRDGWELLGDY

SEQ ID NO: 11627 - protein, 7 aa, Homo sapiens
  Heavy chain CDR3
TEERMDY

SEQ ID NO: 11628 - protein, 13 aa, Homo sapiens
  Heavy chain CDR3
TRTYTWNDVGWDY

SEQ ID NO: 11629 - protein, 11 aa, Homo sapiens
  Heavy chain CDR3
ARAGIWGPFDY

SEQ ID NO: 11630 - protein, 13 aa, Homo sapiens
  Heavy chain CDR3
ARTYTWNDVGWDY

SEQ ID NO: 11631 - protein, 11 aa, Homo sapiens
  Heavy chain CDR3
ARDGWRLLDDY

SEQ ID NO: 11632 - protein, 13 aa, Homo sapiens
  Heavy chain CDR3
ARTYNWNDVGWDY

SEQ ID NO: 11633 - protein, 11 aa, Homo sapiens
  Heavy chain CDR3
ARGGHYGPFDY

SEQ ID NO: 11634 - protein, 13 aa, Homo sapiens
  Heavy chain CDR3
ARTYTWNDVGWDY

SEQ ID NO: 11635 - protein, 11 aa, Homo sapiens
  Heavy chain CDR3
ARAGILGGMDV

SEQ ID NO: 11636 - protein, 21 aa, Homo sapiens
  Heavy chain CDR3
ARKGDTSNGSGSHYNEGFFDI

SEQ ID NO: 11637 - protein, 11 aa, Homo sapiens
  Heavy chain CDR3
ARGGLLGGFDY

SEQ ID NO: 11638 - protein, 11 aa, Homo sapiens
  Heavy chain CDR3
ARAGNWGPFDY

SEQ ID NO: 11639 - protein, 11 aa, Homo sapiens
  Heavy chain CDR3
ARAGNWGPFDY

SEQ ID NO: 11640 - protein, 11 aa, Homo sapiens
  Heavy chain CDR3
VRDGWRLLDDY

SEQ ID NO: 11641 - protein, 10 aa, Homo sapiens
  Heavy chain CDR3
ARVGANWFDP

SEQ ID NO: 11642 - protein, 11 aa, Homo sapiens
  Heavy chain CDR3
ARDGWELLDDY

SEQ ID NO: 11643 - protein, 11 aa, Homo sapiens
  Heavy chain CDR3
ARGGLLGGFDY

SEQ ID NO: 11644 - protein, 11 aa, Homo sapiens
  Heavy chain CDR3
ARGGLLGGFDY

SEQ ID NO: 11645 - protein, 10 aa, Homo sapiens
  Heavy chain CDR3
ARLSRAGHDY

SEQ ID NO: 11646 - protein, 11 aa, Homo sapiens
  Heavy chain CDR3
ARGGNWGPFDY

SEQ ID NO: 11647 - protein, 11 aa, Homo sapiens
  Heavy chain CDR3
ARAGNWGPFDY

SEQ ID NO: 11648 - protein, 11 aa, Homo sapiens
  Heavy chain CDR3
VRDGWELLDDY

SEQ ID NO: 11649 - protein, 11 aa, Homo sapiens
  Heavy chain CDR3
VRGGIWGNFDY

SEQ ID NO: 11650 - protein, 11 aa, Homo sapiens
  Heavy chain CDR3
ARGGIWGYFDS

SEQ ID NO: 11651 - protein, 11 aa, Homo sapiens
  Heavy chain CDR3
ARAGNWGPFDS

SEQ ID NO: 11652 - protein, 11 aa, Homo sapiens
  Heavy chain CDR3
ARDGWKLLDDY

SEQ ID NO: 11653 - protein, 11 aa, Homo sapiens
  Heavy chain CDR3
VRDGWELLGDY

SEQ ID NO: 11654 - protein, 11 aa, Homo sapiens
  Heavy chain CDR3
ARGGIWGYFDY

SEQ ID NO: 11655 - protein, 10 aa, Homo sapiens
  Heavy chain CDR3
ARVGASGVDY

SEQ ID NO: 11656 - protein, 7 aa, Homo sapiens
  Heavy chain CDR3
TEERMDY

SEQ ID NO: 11657 - protein, 16 aa, Homo sapiens
  Heavy chain CDR3
ARDPPITLVRGAPFDY

SEQ ID NO: 11658 - protein, 16 aa, Homo sapiens
  Heavy chain CDR3
ARDPPITMVRGAPFDY

SEQ ID NO: 11659 - protein, 10 aa, Homo sapiens
  Heavy chain CDR3
ARVGANWFDP

SEQ ID NO: 11660 - protein, 11 aa, Homo sapiens
  Heavy chain CDR3
ARGGLLGGFDY

SEQ ID NO: 11661 - protein, 11 aa, Homo sapiens
  Heavy chain CDR3
ARGGFFGPFDY

SEQ ID NO: 11662 - protein, 11 aa, Homo sapiens
  Heavy chain CDR3
VRDGWKLLDDY

SEQ ID NO: 11663 - protein, 16 aa, Homo sapiens
  Heavy chain CDR3
ARDPPITMVRGAPFDY

SEQ ID NO: 11664 - protein, 11 aa, Homo sapiens
  Heavy chain CDR3
ARDGWRLLDDY

SEQ ID NO: 11665 - protein, 14 aa, Homo sapiens
  Heavy chain CDR3
ARLYCSGGSCYSDY

SEQ ID NO: 11666 - protein, 16 aa, Homo sapiens
  Heavy chain CDR3
ARDPPITMVRDAPFDY

SEQ ID NO: 11667 - protein, 13 aa, Homo sapiens
  Heavy chain CDR3
TRTYTWNDVGWDY

SEQ ID NO: 11668 - protein, 21 aa, Homo sapiens
  Heavy chain CDR3
ARKGDNSYGSGSYYNEGFFDM

SEQ ID NO: 11669 - protein, 11 aa, Homo sapiens
  Heavy chain CDR3
ARVGLLGGMDV

SEQ ID NO: 11670 - protein, 11 aa, Homo sapiens
  Heavy chain CDR3
VRDGWELLGDY

SEQ ID NO: 11671 - protein, 11 aa, Homo sapiens
  Heavy chain CDR3
VRDGWKLLDDY

SEQ ID NO: 11672 - protein, 21 aa, Homo sapiens
  Heavy chain CDR3
ARKGDTSNGSGSHYNEGFFDI

SEQ ID NO: 11673 - protein, 11 aa, Homo sapiens
  Heavy chain CDR3
ARGGLLGATDY

SEQ ID NO: 11674 - protein, 11 aa, Homo sapiens
  Heavy chain CDR3
ARDGWRLLDDY

SEQ ID NO: 11675 - protein, 11 aa, Homo sapiens
  Heavy chain CDR3
ARGGLIGGFDF

SEQ ID NO: 11676 - protein, 16 aa, Homo sapiens
  Heavy chain CDR3
ARDPPITMFRGAPFDY

SEQ ID NO: 11677 - protein, 11 aa, Homo sapiens
  Heavy chain CDR3
ARVGLLGAMDV

SEQ ID NO: 11678 - protein, 11 aa, Homo sapiens
  Heavy chain CDR3
ARGGLIGGFDH

SEQ ID NO: 11679 - protein, 11 aa, Homo sapiens
  Heavy chain CDR3
VRGGIWGYFDY

SEQ ID NO: 11680 - protein, 13 aa, Homo sapiens
  Heavy chain CDR3
ARKNGYDPNGFDP

SEQ ID NO: 11681 - protein, 11 aa, Homo sapiens
  Heavy chain CDR3
VRDGWKLLDDY

SEQ ID NO: 11682 - protein, 10 aa, Homo sapiens
  Heavy chain CDR3
ARVGANWFDP

SEQ ID NO: 11683 - protein, 11 aa, Homo sapiens
  Heavy chain CDR3
ARGGFFGPFDY

SEQ ID NO: 11684 - protein, 11 aa, Homo sapiens
  Heavy chain CDR3
ARSGSLGAFDI

SEQ ID NO: 11685 - protein, 11 aa, Homo sapiens
  Heavy chain CDR3
ARDGWKLLDDY

SEQ ID NO: 11686 - protein, 11 aa, Homo sapiens
  Heavy chain CDR3
ARDGWRLLDDY

SEQ ID NO: 11687 - protein, 16 aa, Homo sapiens
  Heavy chain CDR3
ARDPPITMVRGAPFDY

SEQ ID NO: 11688 - protein, 11 aa, Homo sapiens
  Heavy chain CDR3
ARGGLLGGFDY

SEQ ID NO: 11689 - protein, 13 aa, Homo sapiens
  Heavy chain CDR3
ARTYNWNDVGWDY

SEQ ID NO: 11690 - protein, 11 aa, Homo sapiens
  Heavy chain CDR3
ARQGYMGSLDY

SEQ ID NO: 11691 - protein, 10 aa, Homo sapiens
  Heavy chain CDR3
ARVGANWFDP

SEQ ID NO: 11692 - protein, 11 aa, Homo sapiens
  Heavy chain CDR3
ARGGLLGGFDY

SEQ ID NO: 11693 - protein, 11 aa, Homo sapiens
  Heavy chain CDR3
VRDGWELLGDY

SEQ ID NO: 11694 - protein, 11 aa, Homo sapiens
  Heavy chain CDR3
ARDGWELLDDY

SEQ ID NO: 11695 - protein, 11 aa, Homo sapiens
  Heavy chain CDR3
ARDGWKLLDDY

SEQ ID NO: 11696 - protein, 11 aa, Homo sapiens
  Heavy chain CDR3
MRDGWELLGDF

SEQ ID NO: 11697 - protein, 10 aa, Homo sapiens
  Heavy chain CDR3
ARKSPWGFDY

SEQ ID NO: 11698 - protein, 11 aa, Homo sapiens
  Heavy chain CDR3
ARDGWKLLDDY

SEQ ID NO: 11699 - protein, 11 aa, Homo sapiens
  Heavy chain CDR3
ARDGWKLLDDY

SEQ ID NO: 11700 - protein, 11 aa, Homo sapiens
  Heavy chain CDR3
ARDGWKRLDDY

SEQ ID NO: 11701 - protein, 11 aa, Homo sapiens
  Heavy chain CDR3
ARDGWKLLDDS

SEQ ID NO: 11702 - protein, 11 aa, Homo sapiens
  Heavy chain CDR3
ARDGWKLLDDY

SEQ ID NO: 11703 - protein, 13 aa, Homo sapiens
  Heavy chain CDR3
ARTYTWNDVGWDY

SEQ ID NO: 11704 - protein, 11 aa, Homo sapiens
  Heavy chain CDR3
ARDGWNLLDDY

SEQ ID NO: 11705 - protein, 10 aa, Homo sapiens
  Heavy chain CDR3
ARKNRWGFDY

SEQ ID NO: 11706 - protein, 11 aa, Homo sapiens
  Heavy chain CDR3
ARDGWKLRDDY

SEQ ID NO: 11707 - protein, 21 aa, Homo sapiens
  Heavy chain CDR3
ARKGDNSYGSGSHYNEGFFDI

SEQ ID NO: 11708 - protein, 12 aa, Homo sapiens
  Heavy chain CDR3
ARGPSGPYEGDY

SEQ ID NO: 11709 - protein, 11 aa, Homo sapiens
  Heavy chain CDR3
VRDGWKLLDDY

SEQ ID NO: 11710 - protein, 10 aa, Homo sapiens
  Heavy chain CDR3
ARVGANWFDP

SEQ ID NO: 11711 - protein, 11 aa, Homo sapiens
  Heavy chain CDR3
TRGELLGYFDY

SEQ ID NO: 11712 - protein, 11 aa, Homo sapiens
  Heavy chain CDR3
ARVGRHLAFAY

SEQ ID NO: 11713 - protein, 11 aa, Homo sapiens
  Heavy chain CDR3
ARGHLLGYFDY

SEQ ID NO: 11714 - protein, 11 aa, Homo sapiens
  Heavy chain CDR3
ARGALLGAFDI

SEQ ID NO: 11715 - protein, 11 aa, Homo sapiens
  Heavy chain CDR3
ARGGLMGGFDY

SEQ ID NO: 11716 - protein, 11 aa, Homo sapiens
  Heavy chain CDR3
ARGGYFGCFDH

SEQ ID NO: 11717 - protein, 14 aa, Homo sapiens
  Heavy chain CDR3
AREKGIGWYEGMDV

SEQ ID NO: 11718 - protein, 11 aa, Homo sapiens
  Heavy chain CDR3
ARGGQLGYFDY

SEQ ID NO: 11719 - protein, 13 aa, Homo sapiens
  Heavy chain CDR3
ARGYRGSYGLFDY

SEQ ID NO: 11720 - protein, 14 aa, Homo sapiens
  Heavy chain CDR3
AKEKGIGWYEGMDV

SEQ ID NO: 11721 - protein, 11 aa, Homo sapiens
  Heavy chain CDR3
ARVGRFGEFDY

SEQ ID NO: 11722 - protein, 11 aa, Homo sapiens
  Heavy chain CDR3
TRGGYFGCFDY

SEQ ID NO: 11723 - protein, 11 aa, Homo sapiens
  Heavy chain CDR3
ARGGYLGAFDI

SEQ ID NO: 11724 - protein, 11 aa, Homo sapiens
  Heavy chain CDR3
ARGGYFGCFDY

SEQ ID NO: 11725 - protein, 11 aa, Homo sapiens
  Heavy chain CDR3
ARGGYFGCFDY

SEQ ID NO: 11726 - protein, 11 aa, Homo sapiens
  Heavy chain CDR3
ARGDLLGAFDI

SEQ ID NO: 11727 - protein, 11 aa, Homo sapiens
  Heavy chain CDR3
ARGGYFGCFDY

SEQ ID NO: 11728 - protein, 13 aa, Homo sapiens
  Heavy chain CDR3
ARLTGTTSHAFDI

SEQ ID NO: 11729 - protein, 9 aa, Homo sapiens
  Heavy chain CDR3
ARVGPSFDY

SEQ ID NO: 11730 - protein, 10 aa, Homo sapiens
  Heavy chain CDR3
ARVGVNWFDP

SEQ ID NO: 11731 - protein, 13 aa, Homo sapiens
  Heavy chain CDR3
ARLTGATSHAFDI

SEQ ID NO: 11732 - protein, 10 aa, Homo sapiens
  Heavy chain CDR3
VRVGANWFDP

SEQ ID NO: 11733 - protein, 11 aa, Homo sapiens
  Heavy chain CDR3
ARNQPLGSFDY

SEQ ID NO: 11734 - protein, 11 aa, Homo sapiens
  Heavy chain CDR3
ARGELLGYFDY

SEQ ID NO: 11735 - protein, 11 aa, Homo sapiens
  Heavy chain CDR3
ARGGYFGCFDH

SEQ ID NO: 11736 - protein, 10 aa, Homo sapiens
  Heavy chain CDR3
ARVGANWFDP

SEQ ID NO: 11737 - protein, 11 aa, Homo sapiens
  Heavy chain CDR3
ARVAGYDAFDI

SEQ ID NO: 11738 - protein, 10 aa, Homo sapiens
  Heavy chain CDR3
ARVGANWFDP

SEQ ID NO: 11739 - protein, 10 aa, Homo sapiens
  Heavy chain CDR3
ARVGANWFDP

SEQ ID NO: 11740 - protein, 11 aa, Homo sapiens
  Heavy chain CDR3
ARGALLGAFDI

SEQ ID NO: 11741 - protein, 10 aa, Homo sapiens
  Heavy chain CDR3
ARVGANWFDP

SEQ ID NO: 11742 - protein, 11 aa, Homo sapiens
  Heavy chain CDR3
ARGGYFGCFDY

SEQ ID NO: 11743 - protein, 11 aa, Homo sapiens
  Heavy chain CDR3
TRGELLGYFDY

SEQ ID NO: 11744 - protein, 17 aa, Homo sapiens
  Heavy chain CDR3
ARDPVTMVRGVHWYFDL

SEQ ID NO: 11745 - protein, 11 aa, Homo sapiens
  Heavy chain CDR3
TRGELLGYFDY

SEQ ID NO: 11746 - protein, 11 aa, Homo sapiens
  Heavy chain CDR3
ARVGRHLAFAY

SEQ ID NO: 11747 - protein, 11 aa, Homo sapiens
  Heavy chain CDR3
ARGALLGAFEI

SEQ ID NO: 11748 - protein, 11 aa, Homo sapiens
  Heavy chain CDR3
ARGELLGYFDY

SEQ ID NO: 11749 - protein, 11 aa, Homo sapiens
  Heavy chain CDR3
ARGGYFGCFDY

SEQ ID NO: 11750 - protein, 11 aa, Homo sapiens
  Heavy chain CDR3
ARGGYFGCFDY

SEQ ID NO: 11751 - protein, 11 aa, Homo sapiens
  Heavy chain CDR3
ARGALLGGFDY

SEQ ID NO: 11752 - protein, 11 aa, Homo sapiens
  Heavy chain CDR3
ARGGELGPFDY

SEQ ID NO: 11753 - protein, 11 aa, Homo sapiens
  Heavy chain CDR3
ARAGNWGAFDI

SEQ ID NO: 11754 - protein, 11 aa, Homo sapiens
  Heavy chain CDR3
ARGGLTGDFDY

SEQ ID NO: 11755 - protein, 11 aa, Homo sapiens
  Heavy chain CDR3
ARGGSYGAFDI

SEQ ID NO: 11756 - protein, 11 aa, Homo sapiens
  Heavy chain CDR3
ARGELLGYFDN

SEQ ID NO: 11757 - protein, 11 aa, Homo sapiens
  Heavy chain CDR3
ARGELLGYFDS

SEQ ID NO: 11758 - protein, 11 aa, Homo sapiens
  Heavy chain CDR3
ARGGLLGHFDY

SEQ ID NO: 11759 - protein, 11 aa, Homo sapiens
  Heavy chain CDR3
ARGELLGYFDY

SEQ ID NO: 11760 - protein, 11 aa, Homo sapiens
  Heavy chain CDR3
ARGGLLGHFDY

SEQ ID NO: 11761 - protein, 11 aa, Homo sapiens
  Heavy chain CDR3
ARGGRLGAFDY

SEQ ID NO: 11762 - protein, 11 aa, Homo sapiens
  Heavy chain CDR3
ARGGLLGYFDY

SEQ ID NO: 11763 - protein, 11 aa, Homo sapiens
  Heavy chain CDR3
ARGDLLGSFDY

SEQ ID NO: 11764 - protein, 11 aa, Homo sapiens
  Heavy chain CDR3
ARGELLGYFDY

SEQ ID NO: 11765 - protein, 11 aa, Homo sapiens
  Heavy chain CDR3
VRGELLGYFDY

SEQ ID NO: 11766 - protein, 13 aa, Homo sapiens
  Heavy chain CDR3
ARGSILAAGIFDY

SEQ ID NO: 11767 - protein, 11 aa, Homo sapiens
  Heavy chain CDR3
ARGGDWGAFDI

SEQ ID NO: 11768 - protein, 10 aa, Homo sapiens
  Heavy chain CDR3
ARSIVGAFDF

SEQ ID NO: 11769 - protein, 11 aa, Homo sapiens
  Heavy chain CDR3
ARGGLTGGFDY

SEQ ID NO: 11770 - protein, 11 aa, Homo sapiens
  Heavy chain CDR3
ARGGFFGCFDY

SEQ ID NO: 11771 - protein, 11 aa, Homo sapiens
  Heavy chain CDR3
ARGGYLGAFDI

SEQ ID NO: 11772 - protein, 11 aa, Homo sapiens
  Heavy chain CDR3
ARGSKLGPFDY

SEQ ID NO: 11773 - protein, 11 aa, Homo sapiens
  Heavy chain CDR3
ARGGYYGAFDI

SEQ ID NO: 11774 - protein, 11 aa, Homo sapiens
  Heavy chain CDR3
ARGDLLGSFDY

SEQ ID NO: 11775 - protein, 11 aa, Homo sapiens
  Heavy chain CDR3
ARGHLLGSFDY

SEQ ID NO: 11776 - protein, 13 aa, Homo sapiens
  Heavy chain CDR3
ARGYRGSYGLFDY

SEQ ID NO: 11777 - protein, 11 aa, Homo sapiens
  Heavy chain CDR3
ARGHLLGYFDY

SEQ ID NO: 11778 - protein, 17 aa, Homo sapiens
  Heavy chain CDR3
AKDLLRYFDWLLSPFDY

SEQ ID NO: 11779 - protein, 11 aa, Homo sapiens
  Heavy chain CDR3
ARGGYYGAFDI

SEQ ID NO: 11780 - protein, 17 aa, Homo sapiens
  Heavy chain CDR3
AREDDILTAYYYYGMDV

SEQ ID NO: 11781 - protein, 11 aa, Homo sapiens
  Heavy chain CDR3
ARGGYYGPFDI

SEQ ID NO: 11782 - protein, 11 aa, Homo sapiens
  Heavy chain CDR3
ARGGLMGGFDY

SEQ ID NO: 11783 - protein, 10 aa, Homo sapiens
  Heavy chain CDR3
ARSIVGAFDY

SEQ ID NO: 11784 - protein, 13 aa, Homo sapiens
  Heavy chain CDR3
ARGYSGSYGLFDY

SEQ ID NO: 11785 - protein, 11 aa, Homo sapiens
  Heavy chain CDR3
ARGGYFGCFDH

SEQ ID NO: 11786 - protein, 11 aa, Homo sapiens
  Heavy chain CDR3
ARNQPLGSFDY

SEQ ID NO: 11787 - protein, 17 aa, Homo sapiens
  Heavy chain CDR3
ARDRGTYYDYYYYGMDV

SEQ ID NO: 11788 - protein, 15 aa, Homo sapiens
  Heavy chain CDR3
ARDDDILTGLYGMDV

SEQ ID NO: 11789 - protein, 17 aa, Homo sapiens
  Heavy chain CDR3
ARDRGTYYDYYYYGMDV

SEQ ID NO: 11790 - protein, 18 aa, Homo sapiens
  Heavy chain CDR3
ARDRYYYGSGRYYRYLDL

SEQ ID NO: 11791 - protein, 14 aa, Homo sapiens
  Heavy chain CDR3
ARDRGSGNYEYFDL

SEQ ID NO: 11792 - protein, 14 aa, Homo sapiens
  Heavy chain CDR3
ARIGRIAAAGSIDY

SEQ ID NO: 11793 - protein, 11 aa, Homo sapiens
  Heavy chain CDR3
ARAGNWGAFDI

SEQ ID NO: 11794 - protein, 11 aa, Homo sapiens
  Heavy chain CDR3
ARGGLTGAFDI

SEQ ID NO: 11795 - protein, 11 aa, Homo sapiens
  Heavy chain CDR3
ARGALLGGFDY

SEQ ID NO: 11796 - protein, 9 aa, Homo sapiens
  Heavy chain CDR3
ARVGPHFDY

SEQ ID NO: 11797 - protein, 11 aa, Homo sapiens
  Heavy chain CDR3
ARGGLLGSFDY

SEQ ID NO: 11798 - protein, 12 aa, Homo sapiens
  Heavy chain CDR3
ARGANWGPHFDY

SEQ ID NO: 11799 - protein, 11 aa, Homo sapiens
  Heavy chain CDR3
ARGALLGAFDI

SEQ ID NO: 11800 - protein, 9 aa, Homo sapiens
  Heavy chain CDR3
ARGPPTLHY

SEQ ID NO: 11801 - protein, 13 aa, Homo sapiens
  Heavy chain CDR3
ARGGLWFGEFLDY

SEQ ID NO: 11802 - protein, 11 aa, Homo sapiens
  Heavy chain CDR3
VRGDLLGSFDY

SEQ ID NO: 11803 - protein, 14 aa, Homo sapiens
  Heavy chain CDR3
ARDKVLLWFGEFDY

SEQ ID NO: 11804 - protein, 11 aa, Homo sapiens
  Heavy chain CDR3
SFRYTYGPFDY

SEQ ID NO: 11805 - protein, 11 aa, Homo sapiens
  Heavy chain CDR3
VRSGLVTPFDY

SEQ ID NO: 11806 - protein, 10 aa, Homo sapiens
  Heavy chain CDR3
ARVGGATIDY

SEQ ID NO: 11807 - protein, 11 aa, Homo sapiens
  Heavy chain CDR3
ARGGLTGDFNY

SEQ ID NO: 11808 - protein, 11 aa, Homo sapiens
  Heavy chain CDR3
ARGGLLGCFDY

SEQ ID NO: 11809 - protein, 16 aa, Homo sapiens
  Heavy chain CDR3
ARGGGLLWFGGIGMDV

SEQ ID NO: 11810 - protein, 11 aa, Homo sapiens
  Heavy chain CDR3
SRGELLGYFDY

SEQ ID NO: 11811 - protein, 11 aa, Homo sapiens
  Heavy chain CDR3
TRGELLGYFDY

SEQ ID NO: 11812 - protein, 11 aa, Homo sapiens
  Heavy chain CDR3
ARGGSYGAFDI

SEQ ID NO: 11813 - protein, 11 aa, Homo sapiens
  Heavy chain CDR3
ARGELLGYLDY

SEQ ID NO: 11814 - protein, 11 aa, Homo sapiens
  Heavy chain CDR3
ARGGYFGCFDF

SEQ ID NO: 11815 - protein, 15 aa, Homo sapiens
  Heavy chain CDR3
ARDDDILTGLYGMDV

SEQ ID NO: 11816 - protein, 11 aa, Homo sapiens
  Heavy chain CDR3
ARGGYYGAFDI

SEQ ID NO: 11817 - protein, 11 aa, Homo sapiens
  Heavy chain CDR3
VRGELLGYFDN

SEQ ID NO: 11818 - protein, 11 aa, Homo sapiens
  Heavy chain CDR3
ARGGYFGCFDY

SEQ ID NO: 11819 - protein, 11 aa, Homo sapiens
  Heavy chain CDR3
ARGELLGYFDY

SEQ ID NO: 11820 - protein, 11 aa, Homo sapiens
  Heavy chain CDR3
LTVAGPHVFDY

SEQ ID NO: 11821 - protein, 11 aa, Homo sapiens
  Heavy chain CDR3
ARGGYFGCFDY

SEQ ID NO: 11822 - protein, 11 aa, Homo sapiens
  Heavy chain CDR3
TRGELLGYFDY

SEQ ID NO: 11823 - protein, 11 aa, Homo sapiens
  Heavy chain CDR3
ARGGYFGCFDY

SEQ ID NO: 11824 - protein, 11 aa, Homo sapiens
  Heavy chain CDR3
ARGSKLGPFDY

SEQ ID NO: 11825 - protein, 11 aa, Homo sapiens
  Heavy chain CDR3
ARGGYFGCFDQ

SEQ ID NO: 11826 - protein, 11 aa, Homo sapiens
  Heavy chain CDR3
ARGGYFGCFDY

SEQ ID NO: 11827 - protein, 11 aa, Homo sapiens
  Heavy chain CDR3
ARGDLLGYFDY

SEQ ID NO: 11828 - protein, 11 aa, Homo sapiens
  Heavy chain CDR3
ARGELLGYFDY

SEQ ID NO: 11829 - protein, 11 aa, Homo sapiens
  Heavy chain CDR3
ARAGNWGAFDI

SEQ ID NO: 11830 - protein, 11 aa, Homo sapiens
  Heavy chain CDR3
VRGELLGYFDN

SEQ ID NO: 11831 - protein, 11 aa, Homo sapiens
  Heavy chain CDR3
ARGGYFGCFDH

SEQ ID NO: 11832 - protein, 11 aa, Homo sapiens
  Heavy chain CDR3
ARGELLGYFDN

SEQ ID NO: 11833 - protein, 14 aa, Homo sapiens
  Heavy chain CDR3
AREKGSGWYEGMDV

SEQ ID NO: 11834 - protein, 11 aa, Homo sapiens
  Heavy chain CDR3
ARGAKLGPFDY

SEQ ID NO: 11835 - protein, 11 aa, Homo sapiens
  Heavy chain CDR3
ARGGRLGAFDY

SEQ ID NO: 11836 - protein, 11 aa, Homo sapiens
  Heavy chain CDR3
ARGGYLGAFDI

SEQ ID NO: 11837 - protein, 11 aa, Homo sapiens
  Heavy chain CDR3
TRGELLGHFDY

SEQ ID NO: 11838 - protein, 11 aa, Homo sapiens
  Heavy chain CDR3
ARGGYFGCFDP

SEQ ID NO: 11839 - protein, 11 aa, Homo sapiens
  Heavy chain CDR3
ARGGYFGCFDS

SEQ ID NO: 11840 - protein, 11 aa, Homo sapiens
  Heavy chain CDR3
ARGELLGYFDY

SEQ ID NO: 11841 - protein, 11 aa, Homo sapiens
  Heavy chain CDR3
ARGGYFGCFDY

SEQ ID NO: 11842 - protein, 11 aa, Homo sapiens
  Heavy chain CDR3
TRGELLGYVDY

SEQ ID NO: 11843 - protein, 11 aa, Homo sapiens
  Heavy chain CDR3
TRGELLGYFDY

SEQ ID NO: 11844 - protein, 11 aa, Homo sapiens
  Heavy chain CDR3
ARGGYFGCVDY

SEQ ID NO: 11845 - protein, 11 aa, Homo sapiens
  Heavy chain CDR3
TRGDLLGYFDY

SEQ ID NO: 11846 - protein, 12 aa, Homo sapiens
  Heavy chain CDR3
ARGGLLGPYFDY

SEQ ID NO: 11847 - protein, 12 aa, Homo sapiens
  Heavy chain CDR3
ARGGDWGPYFDY

SEQ ID NO: 11848 - protein, 12 aa, Homo sapiens
  Heavy chain CDR3
ARGGVWGPYFDY

SEQ ID NO: 11849 - protein, 11 aa, Homo sapiens
  Heavy chain CDR3
ARAGDLGAFDI

SEQ ID NO: 11850 - protein, 10 aa, Homo sapiens
  Heavy chain CDR3
ARVGAGDWDY

SEQ ID NO: 11851 - protein, 11 aa, Homo sapiens
  Heavy chain CDR3
ARAHYFGAFDI

SEQ ID NO: 11852 - protein, 11 aa, Homo sapiens
  Heavy chain CDR3
AKDLLWLGFDY

SEQ ID NO: 11853 - protein, 12 aa, Homo sapiens
  Heavy chain CDR3
ARGGDWGPYFDY

SEQ ID NO: 11854 - protein, 11 aa, Homo sapiens
  Heavy chain CDR3
ARNGLIGAFDI

SEQ ID NO: 11855 - protein, 11 aa, Homo sapiens
  Heavy chain CDR3
ARAGHLGAFDI

SEQ ID NO: 11856 - protein, 11 aa, Homo sapiens
  Heavy chain CDR3
ARAGDLGAFDI

SEQ ID NO: 11857 - protein, 11 aa, Homo sapiens
  Heavy chain CDR3
AKLGIAWYFDV

SEQ ID NO: 11858 - protein, 11 aa, Homo sapiens
  Heavy chain CDR3
ARAGDLAAFDI

SEQ ID NO: 11859 - protein, 11 aa, Homo sapiens
  Heavy chain CDR3
ARGGQLGPFDY

SEQ ID NO: 11860 - protein, 9 aa, Homo sapiens
  Heavy chain CDR3
ARWVRGVDY

SEQ ID NO: 11861 - protein, 12 aa, Homo sapiens
  Heavy chain CDR3
ARGEYFGEFFDY

SEQ ID NO: 11862 - protein, 11 aa, Homo sapiens
  Heavy chain CDR3
ARASLTGSFDY

SEQ ID NO: 11863 - protein, 11 aa, Homo sapiens
  Heavy chain CDR3
VRAGYLGAFDI

SEQ ID NO: 11864 - protein, 16 aa, Homo sapiens
  Heavy chain CDR3
ARAPHYAILTGYYEDY

SEQ ID NO: 11865 - protein, 13 aa, Homo sapiens
  Heavy chain CDR3
ARDYYDSSGYFDY

SEQ ID NO: 11866 - protein, 11 aa, Homo sapiens
  Heavy chain CDR3
ARVTGRDAFDI

SEQ ID NO: 11867 - protein, 13 aa, Homo sapiens
  Heavy chain CDR3
ARGGILAAGIFDY

SEQ ID NO: 11868 - protein, 15 aa, Homo sapiens
  Heavy chain CDR3
ARMLRGAPYYYGMDV

SEQ ID NO: 11869 - protein, 11 aa, Homo sapiens
  Heavy chain CDR3
ARASLTGSFDY

SEQ ID NO: 11870 - protein, 10 aa, Homo sapiens
  Heavy chain CDR3
ARVGPINLDY

SEQ ID NO: 11871 - protein, 11 aa, Homo sapiens
  Heavy chain CDR3
ARGSQLGPFDY

SEQ ID NO: 11872 - protein, 12 aa, Homo sapiens
  Heavy chain CDR3
ARGGLLGPYFDY

SEQ ID NO: 11873 - protein, 12 aa, Homo sapiens
  Heavy chain CDR3
ARGDILTGYYGY

SEQ ID NO: 11874 - protein, 12 aa, Homo sapiens
  Heavy chain CDR3
ARGGVWGSYFDY

SEQ ID NO: 11875 - protein, 12 aa, Homo sapiens
  Heavy chain CDR3
ARGGLLGPYFDY

SEQ ID NO: 11876 - protein, 10 aa, Homo sapiens
  Heavy chain CDR3
ARVGPTNLDY

SEQ ID NO: 11877 - protein, 9 aa, Homo sapiens
  Heavy chain CDR3
AKVSGYFDY

SEQ ID NO: 11878 - protein, 16 aa, Homo sapiens
  Heavy chain CDR3
ARAPHYGILTGYYEDY

SEQ ID NO: 11879 - protein, 11 aa, Homo sapiens
  Heavy chain CDR3
ARAGYLGAFDI

SEQ ID NO: 11880 - protein, 11 aa, Homo sapiens
  Heavy chain CDR3
ARGGLTGPFDY

SEQ ID NO: 11881 - protein, 11 aa, Homo sapiens
  Heavy chain CDR3
ARGGYWGSFDY

SEQ ID NO: 11882 - protein, 11 aa, Homo sapiens
  Heavy chain CDR3
ARAHYFGAFDI

SEQ ID NO: 11883 - protein, 10 aa, Homo sapiens
  Heavy chain CDR3
ARVRGGGLDV

SEQ ID NO: 11884 - protein, 11 aa, Homo sapiens
  Heavy chain CDR3
SRSGSFGAFDI

SEQ ID NO: 11885 - protein, 13 aa, Homo sapiens
  Heavy chain CDR3
ARGGILAAGIFDY

SEQ ID NO: 11886 - protein, 11 aa, Homo sapiens
  Heavy chain CDR3
ARAGELGPFDY

SEQ ID NO: 11887 - protein, 13 aa, Homo sapiens
  Heavy chain CDR3
VRGSIVAAGLFDY

SEQ ID NO: 11888 - protein, 15 aa, Homo sapiens
  Heavy chain CDR3
ARDYYGSGSPRHFDY

SEQ ID NO: 11889 - protein, 11 aa, Homo sapiens
  Heavy chain CDR3
ARVHYFGAFDI

SEQ ID NO: 11890 - protein, 10 aa, Homo sapiens
  Heavy chain CDR3
ARVAAAGFDY

SEQ ID NO: 11891 - protein, 11 aa, Homo sapiens
  Heavy chain CDR3
ARNSLLTGWDY

SEQ ID NO: 11892 - protein, 12 aa, Homo sapiens
  Heavy chain CDR3
ARGGLLGPYFDY

SEQ ID NO: 11893 - protein, 10 aa, Homo sapiens
  Heavy chain CDR3
ARLGKGLFDY

SEQ ID NO: 11894 - protein, 12 aa, Homo sapiens
  Heavy chain CDR3
ARGGVWGSYFDY

SEQ ID NO: 11895 - protein, 17 aa, Homo sapiens
  Heavy chain CDR3
ARDRYDILTGPYWYFDL

SEQ ID NO: 11896 - protein, 11 aa, Homo sapiens
  Heavy chain CDR3
ARVGVRGIFDY

SEQ ID NO: 11897 - protein, 10 aa, Homo sapiens
  Heavy chain CDR3
ARVRGGGMDV

SEQ ID NO: 11898 - protein, 12 aa, Homo sapiens
  Heavy chain CDR3
ARGGLLGPYFDY

SEQ ID NO: 11899 - protein, 12 aa, Homo sapiens
  Heavy chain CDR3
ARGGVWGPYFDY

SEQ ID NO: 11900 - protein, 13 aa, Homo sapiens
  Heavy chain CDR3
ARGGIVAAGILDY

SEQ ID NO: 11901 - protein, 9 aa, Homo sapiens
  Heavy chain CDR3
ARVAPYFDY

SEQ ID NO: 11902 - protein, 9 aa, Homo sapiens
  Heavy chain CDR3
ARFIYGMDV

SEQ ID NO: 11903 - protein, 10 aa, Homo sapiens
  Heavy chain CDR3
ARVGATNLDY

SEQ ID NO: 11904 - protein, 11 aa, Homo sapiens
  Heavy chain CDR3
ARAGHLGPFDY

SEQ ID NO: 11905 - protein, 11 aa, Homo sapiens
  Heavy chain CDR3
ARAGLLGYFDY

SEQ ID NO: 11906 - protein, 11 aa, Homo sapiens
  Heavy chain CDR3
ARGGHLGSFDY

SEQ ID NO: 11907 - protein, 10 aa, Homo sapiens
  Heavy chain CDR3
ARVRGGGVDV

SEQ ID NO: 11908 - protein, 11 aa, Homo sapiens
  Heavy chain CDR3
ARSGSFGAFDI

SEQ ID NO: 11909 - protein, 9 aa, Homo sapiens
  Heavy chain CDR3
ARLGHYIDY

SEQ ID NO: 11910 - protein, 11 aa, Homo sapiens
  Heavy chain CDR3
ARAGLWSAFDI

SEQ ID NO: 11911 - protein, 11 aa, Homo sapiens
  Heavy chain CDR3
ARQDYWGPFDY

SEQ ID NO: 11912 - protein, 10 aa, Homo sapiens
  Heavy chain CDR3
ARVGIGAFDI

SEQ ID NO: 11913 - protein, 12 aa, Homo sapiens
  Heavy chain CDR3
ARGGDWGPYFDY

SEQ ID NO: 11914 - protein, 16 aa, Homo sapiens
  Heavy chain CDR3
ASAYYDLLTGPYYFDY

SEQ ID NO: 11915 - protein, 11 aa, Homo sapiens
  Heavy chain CDR3
ARAGDLGAFDI

SEQ ID NO: 11916 - protein, 12 aa, Homo sapiens
  Heavy chain CDR3
ARGEWFGEFFDY

SEQ ID NO: 11917 - protein, 10 aa, Homo sapiens
  Heavy chain CDR3
ARSIVGAFDY

SEQ ID NO: 11918 - protein, 11 aa, Homo sapiens
  Heavy chain CDR3
ARGHYFGAFDI

SEQ ID NO: 11919 - protein, 12 aa, Homo sapiens
  Heavy chain CDR3
ARGGLLGPYFDY

SEQ ID NO: 11920 - protein, 17 aa, Homo sapiens
  Heavy chain CDR3
AREDYYGSGRNYYGMDV

SEQ ID NO: 11921 - protein, 11 aa, Homo sapiens
  Heavy chain CDR3
ARAGELGPFDY

SEQ ID NO: 11922 - protein, 11 aa, Homo sapiens
  Heavy chain CDR3
ARAHYFGAFDI

SEQ ID NO: 11923 - protein, 12 aa, Homo sapiens
  Heavy chain CDR3
ARGGDWGPYFDY

SEQ ID NO: 11924 - protein, 11 aa, Homo sapiens
  Heavy chain CDR3
ARAGDLGAFDI

SEQ ID NO: 11925 - protein, 12 aa, Homo sapiens
  Heavy chain CDR3
ARGGVWGSYFDY

SEQ ID NO: 11926 - protein, 11 aa, Homo sapiens
  Heavy chain CDR3
ARGSLLGPFDY

SEQ ID NO: 11927 - protein, 9 aa, Homo sapiens
  Heavy chain CDR3
GRWVRGVEY

SEQ ID NO: 11928 - protein, 12 aa, Homo sapiens
  Heavy chain CDR3
ARGGDWGPYFDY

SEQ ID NO: 11929 - protein, 15 aa, Homo sapiens
  Heavy chain CDR3
ARMLRGAPYYYGMDV

SEQ ID NO: 11930 - protein, 12 aa, Homo sapiens
  Heavy chain CDR3
ARGEFFGEFFDY

SEQ ID NO: 11931 - protein, 11 aa, Homo sapiens
  Heavy chain CDR3
ARAGDLGAFDI

SEQ ID NO: 11932 - protein, 16 aa, Homo sapiens
  Heavy chain CDR3
AREVRVRGVIIPFFDY

SEQ ID NO: 11933 - protein, 16 aa, Homo sapiens
  Heavy chain CDR3
AREVRVRGVIIPFFDY

SEQ ID NO: 11934 - protein, 22 aa, Homo sapiens
  Heavy chain CDR3
AGTYYYGSGSYSGYYYYYGMDV

SEQ ID NO: 11935 - protein, 12 aa, Homo sapiens
  Heavy chain CDR3
ARGGVWGSYFDY

SEQ ID NO: 11936 - protein, 11 aa, Homo sapiens
  Heavy chain CDR3
ARGGLLGPFDY

SEQ ID NO: 11937 - protein, 11 aa, Homo sapiens
  Heavy chain CDR3
ARAGLLGYFDY

SEQ ID NO: 11938 - protein, 11 aa, Homo sapiens
  Heavy chain CDR3
ARGGLIGPFDY

SEQ ID NO: 11939 - protein, 11 aa, Homo sapiens
  Heavy chain CDR3
ARGGHLGSFDY

SEQ ID NO: 11940 - protein, 11 aa, Homo sapiens
  Heavy chain CDR3
ARGGLMGAFDY

SEQ ID NO: 11941 - protein, 12 aa, Homo sapiens
  Heavy chain CDR3
ARGGDWGPYFDY

SEQ ID NO: 11942 - protein, 9 aa, Homo sapiens
  Heavy chain CDR3
GRWVRGVEY

SEQ ID NO: 11943 - protein, 11 aa, Homo sapiens
  Heavy chain CDR3
ARAGHLGPFDY

SEQ ID NO: 11944 - protein, 12 aa, Homo sapiens
  Heavy chain CDR3
ARGGLLGPYFDY

SEQ ID NO: 11945 - protein, 16 aa, Homo sapiens
  Heavy chain CDR3
ASAYYDILTGPYYFDY

SEQ ID NO: 11946 - protein, 12 aa, Homo sapiens
  Heavy chain CDR3
ARGGVWGPYFDY

SEQ ID NO: 11947 - protein, 11 aa, Homo sapiens
  Heavy chain CDR3
ARAGELGPFDY

SEQ ID NO: 11948 - protein, 12 aa, Homo sapiens
  Heavy chain CDR3
ARGGLLGPYFDY

SEQ ID NO: 11949 - protein, 13 aa, Homo sapiens
  Heavy chain CDR3
ARRSAYDPYYFDY

SEQ ID NO: 11950 - protein, 11 aa, Homo sapiens
  Heavy chain CDR3
ARGGLTGPFDY

SEQ ID NO: 11951 - protein, 9 aa, Homo sapiens
  Heavy chain CDR3
GRWVRGVEY

SEQ ID NO: 11952 - protein, 11 aa, Homo sapiens
  Heavy chain CDR3
ARAHYFGAFDI

SEQ ID NO: 11953 - protein, 9 aa, Homo sapiens
  Heavy chain CDR3
GRWVRGVEY

SEQ ID NO: 11954 - protein, 11 aa, Homo sapiens
  Heavy chain CDR3
ARAHYFGAFDI

SEQ ID NO: 11955 - protein, 12 aa, Homo sapiens
  Heavy chain CDR3
ARGGVWGSYFDY

SEQ ID NO: 11956 - protein, 13 aa, Homo sapiens
  Heavy chain CDR3
ARGGILAAGIFDY

SEQ ID NO: 11957 - protein, 13 aa, Homo sapiens
  Heavy chain CDR3
ARGSVVAAGLFDY

SEQ ID NO: 11958 - protein, 12 aa, Homo sapiens
  Heavy chain CDR3
ARGGVWGSYFDY

SEQ ID NO: 11959 - protein, 13 aa, Homo sapiens
  Heavy chain CDR3
ARRSAYDPYYFDY

SEQ ID NO: 11960 - protein, 9 aa, Homo sapiens
  Heavy chain CDR3
AKVSGYFDY

SEQ ID NO: 11961 - protein, 12 aa, Homo sapiens
  Heavy chain CDR3
ARGGVWGSYFDY

SEQ ID NO: 11962 - protein, 12 aa, Homo sapiens
  Heavy chain CDR3
ARGGDWGPYFDY

SEQ ID NO: 11963 - protein, 11 aa, Homo sapiens
  Heavy chain CDR3
ARAGDLGAFDI

SEQ ID NO: 11964 - protein, 11 aa, Homo sapiens
  Heavy chain CDR3
ARAGHLGAFDI

SEQ ID NO: 11965 - protein, 12 aa, Homo sapiens
  Heavy chain CDR3
ARGGDWGPYFDY

SEQ ID NO: 11966 - protein, 11 aa, Homo sapiens
  Heavy chain CDR3
ARAGELGPFDY

SEQ ID NO: 11967 - protein, 11 aa, Homo sapiens
  Heavy chain CDR3
ARAGELGPFDY

SEQ ID NO: 11968 - protein, 5 aa, Artificial Sequence
  Description of Artificial Sequence: Synthetic peptide
  See specification as filed for detailed description of substitutions and preferred embodiments
GGGGS

SEQ ID NO: 11969 - protein, 5 aa, Homo sapiens
CPSCP

SEQ ID NO: 11970 - protein, 5 aa, Homo sapiens
CPPCP

SEQ ID NO: 11971 - protein, 9 aa, Homo sapiens
QQRSNWPLT

SEQ ID NO: 11972 - protein, 13 aa, Homo sapiens
ARDRGASRGAFNI

SEQ ID NO: 11973 - protein, 10 aa, Homo sapiens
QQYGSSPPIT

SEQ ID NO: 11974 - protein, 11 aa, Homo sapiens
AISSWYGFFQN

SEQ ID NO: 11975 - protein, 9 aa, Homo sapiens
QQYGSSPYT

SEQ ID NO: 11976 - protein, 15 aa, Homo sapiens
AREGGAYYYFYGMDV

SEQ ID NO: 11977 - protein, 9 aa, Homo sapiens
QQRSNWPFT

SEQ ID NO: 11978 - protein, 15 aa, Homo sapiens
ARGRPTDYYYYGVDV

SEQ ID NO: 11979 - protein, 9 aa, Homo sapiens
QQANSFPLT

SEQ ID NO: 11980 - protein, 13 aa, Homo sapiens
ARDSTLGRGYFDL

SEQ ID NO: 11981 - protein, 9 aa, Homo sapiens
QQRSNWPLT

SEQ ID NO: 11982 - protein, 13 aa, Homo sapiens
ARDRGASRGAFNI

SEQ ID NO: 11983 - protein, 9 aa, Homo sapiens
QQRSNWPLT

SEQ ID NO: 11984 - protein, 11 aa, Homo sapiens
AISSWYGFFQN

SEQ ID NO: 11985 - protein, 9 aa, Homo sapiens
QQRSNWPLT

SEQ ID NO: 11986 - protein, 15 aa, Homo sapiens
AREGGAYYYFYGMDV

SEQ ID NO: 11987 - protein, 10 aa, Homo sapiens
QQYGSSPPIT

SEQ ID NO: 11988 - protein, 13 aa, Homo sapiens
ARDRGASRGAFNI

SEQ ID NO: 11989 - protein, 10 aa, Homo sapiens
QQYGSSPPIT

SEQ ID NO: 11990 - protein, 11 aa, Homo sapiens
AISSWYGFFQN

SEQ ID NO: 11991 - protein, 10 aa, Homo sapiens
QQYGSSPPIT

SEQ ID NO: 11992 - protein, 15 aa, Homo sapiens
AREGGAYYYFYGMDV

SEQ ID NO: 11993 - protein, 9 aa, Homo sapiens
QQYGSSPYT

SEQ ID NO: 11994 - protein, 13 aa, Homo sapiens
ARDRGASRGAFNI

SEQ ID NO: 11995 - protein, 9 aa, Homo sapiens
QQYGSSPYT

SEQ ID NO: 11996 - protein, 11 aa, Homo sapiens
AISSWYGFFQN

SEQ ID NO: 11997 - protein, 9 aa, Homo sapiens
QQYGSSPYT

SEQ ID NO: 11998 - protein, 15 aa, Homo sapiens
AREGGAYYYFYGMDV

SEQ ID NO: 11999 - protein, 23 aa, Artificial Sequence
  Synthetic sequence
EIVLTQSPGTLSLSPGERATLSC

SEQ ID NO: 12000 - protein, 23 aa, Artificial Sequence
  Synthetic sequence
EIVLTQSPGTLSLSPGERATLSC

SEQ ID NO: 12001 - protein, 23 aa, Artificial Sequence
  Synthetic sequence
EIVLTQSPGTLSLSPGERATLSC

SEQ ID NO: 12002 - protein, 29 aa, Artificial Sequence
  Synthetic sequence
EIVLTQSPGTLSLSPGERATLSCRASQSV

SEQ ID NO: 12003 - protein, 26 aa, Artificial Sequence [sequence omitted]

SEQ ID NO: 12004 - protein, 12 aa, Artificial Sequence
  Synthetic sequence
RASQSVSSSYLA

SEQ ID NO: 12005 - protein, 12 aa, Artificial Sequence
  Synthetic sequence
RASQSVSSSYLA

SEQ ID NO: 12006 - protein, 12 aa, Artificial Sequence
  Synthetic sequence
RASQSVSSSYLA

SEQ ID NO: 12007 - protein, 8 aa, Artificial Sequence
  Synthetic sequence
SSSYLAWY

SEQ ID NO: 12008 - protein, 7 aa, Artificial Sequence
  Synthetic sequence
QSVSSSY

SEQ ID NO: 12009 - protein, 15 aa, Artificial Sequence
  Synthetic sequence
WYQQKPGQAPRLLIY

SEQ ID NO: 12010 - protein, 15 aa, Artificial Sequence
  Synthetic sequence
WYQQKPGQAPRLLIY

SEQ ID NO: 12011 - protein, 15 aa, Artificial Sequence
  Synthetic sequence
WYQQKPGQAPRLLIY

SEQ ID NO: 12012 - protein, 9 aa, Artificial Sequence
  Synthetic sequence
QQKPGQAPR

SEQ ID NO: 12013 - protein, 17 aa, Artificial Sequence
  Synthetic sequence
LAWYQQKPGQAPRLLIY

SEQ ID NO: 12014 - protein, 7 aa, Artificial Sequence
  Synthetic sequence
GASSRAT

SEQ ID NO: 12015 - protein, 7 aa, Artificial Sequence
  Synthetic sequence
GASSRAT

SEQ ID NO: 12016 - protein, 7 aa, Artificial Sequence
  Synthetic sequence
GASSRAT

SEQ ID NO: 12017 - protein, 10 aa, Artificial Sequence
  Synthetic sequence
LLIYGASSRA

SEQ ID NO: 12018 - protein, 2 aa, Artificial Sequence
  Synthetic sequence
GA

SEQ ID NO: 12019 - protein, 32 aa, Artificial Sequence
  Synthetic sequence
GIPDRFSGSGSGTDFTLTISRLEPEDFAVYYC

SEQ ID NO: 12020 - protein, 32 aa, Artificial Sequence; identical to SEQ ID NO: 12019
  Synthetic sequence

SEQ ID NO: 12021 - protein, 32 aa, Artificial Sequence; identical to SEQ ID NO: 12019
  Synthetic sequence

SEQ ID NO: 12022 - protein, 33 aa, Artificial Sequence
  Synthetic sequence
TGIPDRFSGSGSGTDFTLTISRLEPEDFAVYYC

SEQ ID NO: 12023 - protein, 37 aa, Artificial Sequence
  Synthetic sequence
SSRATGIPDRFSGSGSGTDFTLTISRLEPEDFAVYYC

SEQ ID NO: 12024 - protein, 9 aa, Artificial Sequence
  Synthetic sequence
QQYGSSPWT

SEQ ID NO: 12025 - protein, 9 aa, Artificial Sequence
  Synthetic sequence
QQYGSSPWT

SEQ ID NO: 12026 - protein, 9 aa, Artificial Sequence
  Synthetic sequence
QQYGSSPWT

SEQ ID NO: 12027 - protein, 8 aa, Artificial Sequence
  Synthetic sequence
QQYGSSPW

SEQ ID NO: 12028 - protein, 9 aa, Artificial Sequence
  Synthetic sequence
QQYGSSPWT

SEQ ID NO: 12029 - protein, 10 aa, Artificial Sequence
  Synthetic sequence
SGQGTKVEIK

SEQ ID NO: 12030 - protein, 10 aa, Artificial Sequence
  Synthetic sequence
SGQGTKVEIK

SEQ ID NO: 12031 - protein, 10 aa, Artificial Sequence
  Synthetic sequence
SGQGTKVEIK

SEQ ID NO: 12032 - protein, 11 aa, Artificial Sequence
  Synthetic sequence
TSGQGTKVEIK

SEQ ID NO: 12033 - protein, 10 aa, Artificial Sequence
  Synthetic sequence
SGQGTKVEIK

SEQ ID NO: 12034 - protein, 25 aa, Artificial Sequence
  Synthetic sequence
QVQLVESGGGVVQPGRSLRLSCAAS

SEQ ID NO: 12035 - protein, 25 aa, Artificial Sequence
  Synthetic sequence
QVQLVESGGGVVQPGRSLRLSCAAS

SEQ ID NO: 12036 - protein, 30 aa, Artificial Sequence
  Synthetic sequence
QVQLVESGGGVVQPGRSLRLSCAASGFTFS

SEQ ID NO: 12037 - protein, 29 aa, Artificial Sequence
  Synthetic sequence
QVQLVESGGGVVQPGRSLRLSCAASGFTF

SEQ ID NO: 12038 - protein, 25 aa, Artificial Sequence
  Synthetic sequence
QVQLVESGGGVVQPGRSLRLSCAAS

SEQ ID NO: 12039 - protein, 7 aa, Artificial Sequence
  Synthetic sequence
GFTFSSY

SEQ ID NO: 12040 - protein, 10 aa, Artificial Sequence
  Synthetic sequence
GFTFSSYGMH

SEQ ID NO: 12041 - protein, 5 aa, Artificial Sequence
  Synthetic sequence
SYGMH

SEQ ID NO: 12042 - protein, 6 aa, Artificial Sequence
  Synthetic sequence
SSYGMH

SEQ ID NO: 12043 - protein, 8 aa, Artificial Sequence
  Synthetic sequence
GFTFSSYG

SEQ ID NO: 12044 - protein, 19 aa, Artificial Sequence
  Synthetic sequence
GMHWVRQAPGTGLEWVAVI

SEQ ID NO: 12045 - protein, 14 aa, Artificial Sequence
  Synthetic sequence
WVRQAPGTGLEWVA

SEQ ID NO: 12046 - protein, 14 aa, Artificial Sequence
  Synthetic sequence
WVRQAPGTGLEWVA

SEQ ID NO: 12047 - protein, 11 aa, Artificial Sequence
  Synthetic sequence
WVRQAPGTGLE

SEQ ID NO: 12048 - protein, 17 aa, Artificial Sequence
  Synthetic sequence
MHWVRQAPGTGLEWVAV

SEQ ID NO: 12049 - protein, 6 aa, Artificial Sequence
  Synthetic sequence
WYEGRN

SEQ ID NO: 12050 - protein, 10 aa, Artificial Sequence
  Synthetic sequence
VIWYEGRNKY

SEQ ID NO: 12051 - protein, 17 aa, Artificial Sequence
  Synthetic sequence
VIWYEGRNKYYADPVKG

SEQ ID NO: 12052 - protein, 13 aa, Artificial Sequence
  Synthetic sequence
WVAVIWYEGRNKY

SEQ ID NO: 12053 - protein, 8 aa, Artificial Sequence
  Synthetic sequence
IWYEGRNK

SEQ ID NO: 12054 - protein, 41 aa, Artificial Sequence
  Synthetic sequence
KYYADPVKGRFTISRDNSKNTLYLQMNSLRDDDTAVYYCAR

SEQ ID NO: 12055 - protein, 39 aa, Artificial Sequence
  Synthetic sequence
YADPVKGRFTISRDNSKNTLYLQMNSLRDDDTAVYYCAR

SEQ ID NO: 12056 - protein, 32 aa, Artificial Sequence
  Synthetic sequence
RFTISRDNSKNTLYLQMNSLRDDDTAVYYCAR

SEQ ID NO: 12057 - protein, 37 aa, Artificial Sequence
  Synthetic sequence
YADPVKGRFTISRDNSKNTLYLQMNSLRDDDTAVYYC

SEQ ID NO: 12058 - protein, 38 aa, Artificial Sequence
  Synthetic sequence
YYADPVKGRFTISRDNSKNTLYLQMNSLRDDDTAVYYC

SEQ ID NO: 12059 - protein, 9 aa, Artificial Sequence
  Synthetic sequence
AGDLGAFDI

SEQ ID NO: 12060 - protein, 9 aa, Artificial Sequence
  Synthetic sequence
AGDLGAFDI

SEQ ID NO: 12061 - protein, 9 aa, Artificial Sequence
  Synthetic sequence
AGDLGAFDI

SEQ ID NO: 12062 - protein, 10 aa, Artificial Sequence
  Synthetic sequence
ARAGDLGAFD

SEQ ID NO: 12063 - protein, 11 aa, Artificial Sequence
  Synthetic sequence
ARAGDLGAFDI

SEQ ID NO: 12064 - protein, 11 aa, Artificial Sequence
  Synthetic sequence
WGQGTMVTVSS

SEQ ID NO: 12065 - protein, 11 aa, Artificial Sequence
  Synthetic sequence
WGQGTMVTVSS

SEQ ID NO: 12066 - protein, 11 aa, Artificial Sequence
  Synthetic sequence
WGQGTMVTVSS

SEQ ID NO: 12067 - protein, 12 aa, Artificial Sequence
  Synthetic sequence
IWGQGTMVTVSS

SEQ ID NO: 12068 - protein, 11 aa, Artificial Sequence
  Synthetic sequence
WGQGTMVTVSS

SEQ ID NO: 12069 - protein, 7 aa, Artificial Sequence
  Synthetic sequence
GFTFSSY

SEQ ID NO: 12070 - protein, 6 aa, Artificial Sequence
  Synthetic sequence
SYDGNN

SEQ ID NO: 12071 - protein, 9 aa, Artificial Sequence
  Synthetic sequence
TGWLGPFDY

SEQ ID NO: 12072 - protein, 9 aa, Artificial Sequence
  Synthetic sequence
QSVGSSYLA

SEQ ID NO: 12073 - protein, 7 aa, Artificial Sequence
  Synthetic sequence
GAFSRAT

SEQ ID NO: 12074 - protein, 9 aa, Artificial Sequence
  Synthetic sequence
QQYGSSPWT

SEQ ID NO: 12075 - protein, 7 aa, Artificial Sequence
  Synthetic sequence
GFTFSSY

SEQ ID NO: 12076 - protein, 6 aa, Artificial Sequence
  Synthetic sequence
WYEGRN

SEQ ID NO: 12077 - protein, 9 aa, Artificial Sequence
  Synthetic sequence
AGDLGAFDI

SEQ ID NO: 12078 - protein, 9 aa, Artificial Sequence
  Synthetic sequence
QSVSSSYLA

SEQ ID NO: 12079 - protein, 7 aa, Artificial Sequence
  Synthetic sequence
GASSRAT

SEQ ID NO: 12080 - protein, 9 aa, Artificial Sequence
  Synthetic sequence
QQYGSSPWT

SEQ ID NO: 12081 - protein, 7 aa, Artificial Sequence
  Synthetic sequence
QSVGSSY

SEQ ID NO: 12082 - protein, 3 aa, Artificial Sequence
  Synthetic sequence
GAF

SEQ ID NO: 12083 - protein, 9 aa, Artificial Sequence
  Synthetic sequence
QQYGSSPWT

SEQ ID NO: 12084 - protein, 8 aa, Artificial Sequence
  Synthetic sequence
GFTFSSYT

SEQ ID NO: 12085 - protein, 8 aa, Artificial Sequence
  Synthetic sequence
ISYDGNNK

SEQ ID NO: 12086 - protein, 11 aa, Artificial Sequence
  Synthetic sequence
ARTGWLGPFDY

SEQ ID NO: 12087 - protein, 119 aa, Artificial Sequence
  Synthetic sequence
QVQLVESGGGVVQPGRSLRLSCAASGFTFSSYTMHWVRQAPGKGLEWVTFISYDGNNKYYADSVKGRFTISRDNSKNTLYLQMNSLRAEDTAIYYCARTGWLGPFDYWGQGTLVTVSSA

SEQ ID NO: 12088 - protein, 108 aa, Artificial Sequence
  Synthetic sequence
EIVLTQSPGTLSLSPGERATLSCRASQSVGSSYLAWYQQKPGQAPRLLIYGAFSRATGIPDRFSGSGSGTDFTLTISRLEPEDFAVYYCQQYGSSPWTFGQGTKVEIK

What is claimed is:

1. An isolated antigen binding protein (ABP) that specifically binds a human cytotoxic T-lymphocyte associated protein 4 (CTLA-4), wherein
the ABP contacts amino acids K130, Y139, L141, I143 but does not contact amino acid R70 of the CTLA-4; and/or
the CTLA-4 can associate with CD80/CD86 when bound to the ABP; and/or
an interaction between the ABP and amino acid L74A and/or E68 of the CTLA-4 is greater than an interaction between Ipilimumab and amino acid L74A of CTLA-4.

2. The ABP of claim 1, wherein the ABP comprises a CDR1-L consisting of SEQ ID NO:12078 or SEQ ID NO: 1014, a CDR2-L consisting of SEQ ID NO:12079 or SEQ ID NO: 2014, a CDR3-L consisting of SEQ ID NO:12080 or SEQ ID NO: 3014, a CDR1-H consisting of SEQ ID NO:12075 or SEQ ID NO: 4014, a CDR2-H consisting of SEQ ID NO:12076 or SEQ ID NO: 5014 and a CDR3-H consisting of SEQ ID NO:12077 or SEQ ID NO: 6014.

3. The ABP of claim 1, wherein the ABP comprises a CDR1-L consisting of SEQ ID NO: 12004, a CDR2-L consisting of SEQ ID NO: 12014, a CDR3-L consisting of SEQ ID NO: 12024, a CDR1-H consisting of SEQ ID NO: 12039, a CDR2-H consisting of SEQ ID NO: 12049, and a CDR3-H consisting of SEQ ID NO: 12059.

4. The ABP of claim 1, wherein the ABP comprises a CDR1-L consisting of SEQ ID NO: 12005, a CDR2-L consisting of SEQ ID NO: 12015, a CDR3-L consisting of SEQ ID NO: 12025, a CDR1-H consisting of SEQ ID NO: 12040, a CDR2-H consisting of SEQ ID NO: 12050, and a CDR3-H consisting of SEQ ID NO: 12060.

5. The ABP of claim 1, wherein the ABP comprises a CDR1-L consisting of SEQ ID NO: 12006, a CDR2-L consisting of SEQ ID NO: 12016, a CDR3-L consisting of SEQ ID NO: 12026, a CDR1-H consisting of SEQ ID NO: 12041, a CDR2-H consisting of SEQ ID NO: 12051, and a CDR3-H consisting of SEQ ID NO: 12061.

6. The ABP of claim 1, wherein the ABP comprises a CDR1-L consisting of SEQ ID NO: 12007, a CDR2-L consisting of SEQ ID NO: 12017, a CDR3-L consisting of SEQ ID NO: 12027, a CDR1-H consisting of SEQ ID NO: 12042, a CDR2-H consisting of SEQ ID NO: 12052, and a CDR3-H consisting of SEQ ID NO: 12062.

7. The ABP of claim 1, wherein the ABP comprises a CDR1-L consisting of SEQ ID NO: 12008, a CDR2-L consisting of SEQ ID NO: 12018, a CDR3-L consisting of SEQ ID NO: 12028, a CDR1-H consisting of SEQ ID NO: 12043, a CDR2-H consisting of SEQ ID NO: 12053, and a CDR3-H consisting of SEQ ID NO: 12063.

8. The ABP of claim 1 or 2, wherein the ABP comprises
a variable light chain (V_{L}) comprising a sequence at least 97% identical to SEQ ID NO:14 and a variable heavy chain (V_{H}) comprising a sequence at least 97% identical to SEQ ID NO:114.

9. The ABP of any one of claims 1-8, wherein the ABP comprises an scFv or a full length monoclonal antibody.

10. The ABP of any one of claims 1-9, wherein the ABP comprises an immunoglobulin constant region.

11. The ABP of any one of claims 1-10, wherein
the ABP binds human CTLA-4 with a K_{D} of less than 500 nM, as measured by surface plasmon resonance; or
the ABP binds human CTLA-4 with a K_{D} of less than 200 nM, as measured by surface plasmon resonance; or
the ABP binds human CTLA-4 with a K_{D} of less than 25 nM, as measured by surface plasmon resonance; or
the ABP binds to human CTLA-4 on a cell surface with a K_{D} of less than 25 nM.

12. The ABP of any one of claims 1-11, wherein the ABP is a IgG1 ABP.

13. The ABP of any one of claims 1-12, wherein the ABP comprises an IGHG1*01 human heavy chain constant region gene segment.

14. The ABP of any one of claims 1-13, wherein the ABP comprises a lysine at amino acid position 97 (R97) according to IMGT exon numbering.

15. The ABP of any one of claims 1-13, wherein the ABP comprises a lysine at amino acid position 97 (R214) according to EU numbering.

16. The ABP of any one of claims 1-15, comprising an afucosylated Fc region.

17. The ABP of any one of claims 1-16, produced from a cell comprising a bacterial protein RMD (GDP-6-deoxy-D-lyxo-4-hexulose reductase) or a modification thereof.

18. The ABP of claim 13, wherein the cell is cultured in the absence of fucose.

19. The ABP of any one of claims 1-18, produced from a cell lacking or reduced expression of Fut8.

20. The ABP of any one of claims 1-19, produced from a cell cultured in the presence of a fucosylation inhibitor, 2-Fluorfucose (2FF).

21. The ABP of any one of claims 1-20, produced from a cell overexpressing glycosyltransferase (GnTIII).

22. The ABP of any one of claims 1-21, having been isolated based on its fucosylation status.

23. The ABP of any one of claims 1-22, comprising an Fc region lacking core fucosylation of the N-glycan of the Fc portion.

24. The ABP of any one of claims 1-23, wherein the ABP is an afucosylated monoclonal antibody.

25. A pharmaceutical composition comprising the ABP of any one of claims 1-24 and a pharmaceutically acceptable excipient.

26. The pharmaceutical composition of claim 25, wherein less than 50% of the ABP is fucosylated.

27. The pharmaceutical composition of claim 26, wherein less than 40% of the ABP is fucosylated.

28. The pharmaceutical composition of claim 27, wherein less than 30% of the ABP is fucosylated.

29. The pharmaceutical composition of claim 28, wherein less than 20% of the ABP is fucosylated.

30. The pharmaceutical composition of claim 29, wherein less than 10% of the ABP is fucosylated.

31. The pharmaceutical composition of claim 25, wherein more than 30% of the ABP is fucosylated.

32. The pharmaceutical composition of claim 31, wherein more than 40% of the ABP is fucosylated.

33. The pharmaceutical composition of claim 32, wherein more than 50% of the ABP is fucosylated.

34. The pharmaceutical composition of claim 33, wherein more than 60% of the ABP is fucosylated.

35. The pharmaceutical composition of claim 34, wherein more than 70% of the ABP is fucosylated.

36. The pharmaceutical composition of claim 35, wherein more than 80% of the ABP is fucosylated.

37. The pharmaceutical composition of claim 36, wherein more than 90% of the ABP is fucosylated.

38. The pharmaceutical composition of any one of claims 25-37, having a pH from 5.0 to 6.5.

39. The pharmaceutical composition of any one of claims 25-38, comprising 20 mM of histidine or citrate buffer.

40. The pharmaceutical composition of any one of claims 25-39, comprising 50 mM of NaCl.

41. The pharmaceutical composition of any one of claims 25-40, comprising sucrose at a concentration from 170 mM to 270 mM.

42. The pharmaceutical composition of claim 41, comprising 170 mM or 270 mM of sucrose.

43. The pharmaceutical composition of any one of claims 25-42, comprising 5 mg/mL to 20 mg/mL of the ABP.

44. The pharmaceutical composition of any one of claims 26-43, comprising 20 mg/mL of the ABP.

45. The pharmaceutical composition of any one of claims 26-44, comprising 5 mg/mL of the ABP.

46. A method of treating a disease comprising the step of administering to a subject in need thereof an effective amount of the ABP of any of claims 1-24 or the pharmaceutical composition of any one of claims 25-45.

47. The method of claim 46, wherein the disease is selected from the group consisting of cancer, AIDS, Alzheimer's disease and viral or bacterial infection.

48. The method of claim 46 or claim 47, further comprising the step of administering one or more additional therapeutic agents to the subject.

49. The method of claim 48, wherein the additional therapeutic agent is selected from an anti-PD-L1, an anti-PD1, a LAG-3 inhibitor, aCD47 inhibitor, a TIGIT inhibitor, a chemotherapy agent, an immune-stimulatory agent, radiation, a BRAF inhibitor, a MEK inhibitor, a PI3K inhibitor, a cytokine, a polynucleotide encoding a cytokine, an oncolytic virus encoding a cytokine, and a combination thereof.

50. An isolated polynucleotide encoding the ABP of any of claims 1-24.

51. A vector comprising the isolated polynucleotide of claim 50.

52. A host cell comprising the isolated polynucleotide of claim 50 or the vector of claim 51.

53. The host cell of claim 52, wherein the host cell further comprises a bacterial protein RMD (GDP-6-deoxy-D-lyxo-4-hexulose reductase).

54. The host cell of any one of claims 52-53, wherein the host cell is cultured in the absence of fucose.

55. The host cell of any one of claims 52-54, lacking or having reduced expression of Fut8.

56. The host cell of any one of claims 52-55, cultured in the presence of a fucosylation inhibitor 2-Fluorfucose (2FF).

57. The host cell of any one of claims 52-56, overexpressing glycosyltransferase (GnTIII).

58. A method of producing an isolated antigen binding protein (ABP) that specifically binds human CTLA-4, comprising inducing expression of the ABP in the host cell of any one of claims 52-57, and isolating the ABP.

59. The method of claim 58, further comprising the step of isolating the ABP based on its fucosylation status.

60. The method of any one of claims 58-59, wherein the host cell is cultured in a cultured medium comprising a fucosylation inhibitor.

61. The method of claim 60, wherein the fucosylation inhibitor is 2-Fluorfucose (2FF).

62. A method of reducing CTLA-4^{HI} Tregs in a subject with limited proliferation of remaining Tregs comprising administering an effective dose of
the ABP of any one of claims 1-24 or the pharmaceutical composition of any one of claims 25-45 to the subject.

63. The method of claim 62, wherein the subject is a human subject, optionally, a human subject with RCC (renal cell cancer), NSCLC (non-small cell lung cancer), Merkel cell carcinoma, cSCC, mesothelioma, MSI colorectal cancer, ovarian cancer, or cervical cancer.

64. The method of claim 62 or claim 63, further comprising the step of administering one or more additional therapeutic agents to the subject.

65. The method of claim 64, wherein the additional therapeutic agent is an anti-PD-L1 or an anti-PD1 or a combination thereof.

66. An isolated antigen binding protein (ABP) that specifically binds a human cytotoxic T-lymphocyte associated protein 4 (CTLA-4), wherein the ABP comprises:
(a) a CDR1-L consisting of SEQ ID NO:12078, a CDR2-L consisting of SEQ ID NO:12079, a CDR3-L consisting of SEQ ID NO: 12080, a CDR1-H consisting of SEQ ID NO:12075, a CDR2-H consisting of SEQ ID NO:12076 and a CDR3-H consisting of SEQ ID NO:12077;
(b) a CDR1-L consisting of SEQ ID NO: 1014, a CDR2-L consisting of SEQ ID NO: 2014, a CDR3-L consisting of SEQ ID NO: 3014, a CDR1-H consisting of SEQ ID NO: 4014, a CDR2-H consisting of SEQ ID NO: 5014 and a CDR3-H consisting of SEQ ID NO: 6014;
(c) a CDR1-L consisting of SEQ ID NO: 12004, a CDR2-L consisting of SEQ ID NO: 12014, a CDR3-L consisting of SEQ ID NO: 12024, a CDR1-H consisting of SEQ ID NO: 12039, a CDR2-H consisting of SEQ ID NO: 12049, and a CDR3-H consisting of SEQ ID NO: 12059;
(d) a CDR1-L consisting of SEQ ID NO: 12005, a CDR2-L consisting of SEQ ID NO: 12015, a CDR3-L consisting of SEQ ID NO: 12025, a CDR1-H consisting of SEQ ID NO: 12040, a CDR2-H consisting of SEQ ID NO: 12050, and a CDR3-H consisting of SEQ ID NO: 12060;
(e) a CDR1-L consisting of SEQ ID NO: 12006, a CDR2-L consisting of SEQ ID NO: 12016, a CDR3-L consisting of SEQ ID NO: 12026, a CDR1-H consisting of SEQ ID NO: 12041, a CDR2-H consisting of SEQ ID NO: 12051, and a CDR3-H consisting of SEQ ID NO: 12061;
(f) a CDR1-L consisting of SEQ ID NO: 12007, a CDR2-L consisting of SEQ ID NO: 12017, a CDR3-L consisting of SEQ ID NO: 12027, a CDR1-H consisting of SEQ ID NO: 12042, a CDR2-H consisting of SEQ ID NO: 12052, and a CDR3-H consisting of SEQ ID NO: 12062; or
(g) a CDR1-L consisting of SEQ ID NO: 12008, a CDR2-L consisting of SEQ ID NO: 12018, a CDR3-L consisting of SEQ ID NO: 12028, a CDR1-H consisting of SEQ ID NO: 12043, a CDR2-H consisting of SEQ ID NO: 12053, and a CDR3-H consisting of SEQ ID NO: 12063.

67. The ABP of claim 66, wherein the ABP comprises
a variable light chain (V_{L}) comprising a sequence at least 97% identical to SEQ ID NO:14 and a variable heavy chain (V_{H}) comprising a sequence at least 97% identical to SEQ ID NO:114.

68. The ABP of any one of claims 66-67, wherein the ABP comprises an scFv or a full length monoclonal antibody.

69. The ABP of any one of claims 66-68, wherein the ABP comprises an immunoglobulin constant region.

70. The ABP of any one of claims 66-69, wherein
the ABP binds human CTLA-4 with a K_{D} of less than 500 nM, as measured by surface plasmon resonance; or
the ABP binds human CTLA-4 with a K_{D} of less than 200 nM, as measured by surface plasmon resonance; or
the ABP binds human CTLA-4 with a K_{D} of less than 25 nM, as measured by surface plasmon resonance; or
the ABP binds to human CTLA-4 on a cell surface with a K_{D} of less than 25 nM.

71. The ABP of any one of claims 66-70, wherein the ABP is a IgG1 ABP.

72. The ABP of any one of claims 66-71, wherein the ABP comprises an IGHG1*01 human heavy chain constant region gene segment.

73. The ABP of any one of claims 66-72, wherein the ABP comprises a lysine at amino acid position 97 (R97) according to IMGT exon numbering.

74. The ABP of any one of claims 66-73, wherein the ABP comprises a lysine at amino acid position 97 (R214) according to EU numbering.

75. The ABP of any one of claims 66-74, comprising an afucosylated Fc region.

76. The ABP of any one of claims 66-75, produced from a cell comprising a bacterial protein RMD (GDP-6-deoxy-D-lyxo-4-hexulose reductase) or a modification thereof.

77. The ABP of claim 76, wherein the cell is cultured in the absence of fucose.

78. The ABP of any one of claims 66-77, produced from a cell lacking or reduced expression of Fut8.

79. The ABP of any one of claims 66-78, produced from a cell cultured in the presence of a fucosylation inhibitor, 2-Fluorfucose (2FF).

80. The ABP of any one of claims 66-79, produced from a cell overexpressing glycosyltransferase (GnTIII).

81. The ABP of any one of claims 66-80, having been isolated based on its fucosylation status.

82. The ABP of any one of claims 58-81, comprising an Fc region lacking core fucosylation of the N-glycan of the Fc portion.

83. The ABP of any one of claims 66-82, wherein the ABP is an afucosylated monoclonal antibody.

84. The ABP of claim 83, wherein the afucosylated Fc region has less than 30% fucosylation, and wherein less than 30% fucosylation enhances Fc Gamma Receptor IIIa (FcgRIIIa) signaling or a protein encoded by protein encoded by FcgR3a.

85. A pharmaceutical composition comprising the ABP of any one of claims 66-84, and a pharmaceutically acceptable excipient.

86. The pharmaceutical composition of claim 85, wherein less than 50% of the ABP is fucosylated.

87. The pharmaceutical composition of claim 86, wherein less than 40% of the ABP is fucosylated.

88. The pharmaceutical composition of claim 87, wherein less than 30% of the ABP is fucosylated.

89. The pharmaceutical composition of claim 88, wherein less than 20% of the ABP is fucosylated.

90. The pharmaceutical composition of claim 89, wherein less than 10% of the ABP is fucosylated.

91. The pharmaceutical composition of claim 85, wherein more than 30% of the ABP is fucosylated.

92. The pharmaceutical composition of claim 91, wherein more than 40% of the ABP is fucosylated.

93. The pharmaceutical composition of claim 92, wherein more than 50% of the ABP is fucosylated.

94. The pharmaceutical composition of claim 93, wherein more than 60% of the ABP is fucosylated.

95. The pharmaceutical composition of claim 94, wherein more than 70% of the ABP is fucosylated.

96. The pharmaceutical composition of claim 95, wherein more than 80% of the ABP is fucosylated.

97. The pharmaceutical composition of claim 96, wherein more than 90% of the ABP is fucosylated.

98. The pharmaceutical composition of any one of claims 85-97, having a pH from 5.0 to 6.5.

99. The pharmaceutical composition of any one of claims 85-98, comprising 20 mM of histidine or citrate buffer.

100. The pharmaceutical composition of any one of claims 85-99, comprising 50 mM of NaCl.

101. The pharmaceutical composition of any one of claims 85-100, comprising sucrose at a concentration from 170 mM to 270 mM.

102. The pharmaceutical composition of claim 101, comprising 170 mM or 270 mM of sucrose.

103. The pharmaceutical composition of any one of claims 85-102, comprising 20 mg/mL of the ABP.

104. The pharmaceutical composition of any one of claims 85-103, comprising 5 mg/mL of the ABP.

105. A method of treating cancer comprising the step of:
administering to a subject in need thereof an effective amount of the ABP of any of claims 66-84 or the pharmaceutical composition of any one of claims 85-104.

106. The method of claim 105, wherein the subject has a malignant tumor.

107. The method of claim 105, wherein the ABP, when administered, comprises increased Fc receptor (FcR) signaling as compared to ipilimumab, and wherein said administering reduces the amount of CTLA-4^{HI} Tregs in the subject.

108. The method of claim 107, wherein said administering reduces proliferation of peripheral Tregs in the subject as compared to ipilimumab.

109. The method of any one of claims 105-108, further comprising the step of administering one or more additional therapeutic agents to the subject.

110. The method of claim 109, wherein the additional therapeutic agent is selected from an anti-PD-L1, an anti-PD1, a TIGIT inhibitor, a LAG-3 inhibitor, a CD47 inhibitor, a BRAF inhibitor, a MEK inhibitor, a PI3K inhibitor, a chemotherapy agent, an immune-stimulatory agent, radiation, a cytokine, a polynucleotide encoding a cytokine, an oncolytic virus encoding a cytokine, and a combination thereof.

111. The method of any one of claims 105-110, wherein the ABP comprises an afucosylated Fc region that has less than 30% fucosylation, and wherein less than 30% fucosylation enhances Fc Gamma Receptor IIIa (FcgRIIIa) signaling or a protein encoded by protein encoded by FcgR3a.

112. The method of any one of claims 105-110, wherein the ABP comprises a fucosylated Fc region that has more than 70% fucosylation.

113. An isolated polynucleotide encoding the ABP of any of claims 66-84.

114. A vector comprising the isolated polynucleotide of claim 113.

115. A host cell comprising the isolated polynucleotide of claim 113 or the vector of claim 114.

116. The host cell of claim 115, wherein the host cell is engineered to have reduced fucosylation as compared to a host cell that is not engineered.

117. The host cell of claim 116, wherein the host cell further comprises a bacterial protein RMD (GDP-6-deoxy-D-lyxo-4-hexulose reductase).

118. The host cell of any one of claims 115-117, wherein the host cell is cultured in the absence of fucose.

119. The host cell of any one of claims 115-118, lacking or having reduced expression of Fut8.

120. The host cell of any one of claims 115-119, cultured in the presence of a fucosylation inhibitor 2-Fluorfucose (2FF).

121. The host cell of any one of claims 115-120, overexpressing glycosyltransferase (GnTIII).

122. A method of producing an isolated antigen binding protein (ABP) that specifically binds human CTLA-4, comprising inducing expression of the ABP in the host cell of any one of claims 115-121, and isolating the ABP, wherein the ABP comprises an afucosylated Fc.

123. The method of claim 122, further comprising the step of isolating the ABP based on its fucosylation status.

124. The method of any one of claims 115-123, wherein the host cell is cultured in a cultured medium comprising a fucosylation inhibitor.

125. The method of claim 124, wherein the fucosylation inhibitor is 2-Fluorfucose (2FF).

126. An isolated antigen binding protein (ABP) that specifically binds an antigen, comprising an IGHG1*01 human heavy chain constant region gene segment, optionally wherein the antigen is a human cytotoxic T-lymphocyte associated protein 4 (CTLA-4).

127. The ABP of claim 126, wherein the ABP comprises:
(a) a CDR1-L consisting of SEQ ID NO:12078, a CDR2-L consisting of SEQ ID NO:12079, a CDR3-L consisting of SEQ ID NO: 12080, a CDR1-H consisting of SEQ ID NO:12075, a CDR2-H consisting of SEQ ID NO:12076 and a CDR3-H consisting of SEQ ID NO:12077;
(b) a CDR1-L consisting of SEQ ID NO: 1014, a CDR2-L consisting of SEQ ID NO: 2014, a CDR3-L consisting of SEQ ID NO: 3014, a CDR1-H consisting of SEQ ID NO: 4014, a CDR2-H consisting of SEQ ID NO: 5014 and a CDR3-H consisting of SEQ ID NO: 6014;
(c) a CDR1-L consisting of SEQ ID NO: 12004, a CDR2-L consisting of SEQ ID NO: 12014, a CDR3-L consisting of SEQ ID NO: 12024, a CDR1-H consisting of SEQ ID NO: 12039, a CDR2-H consisting of SEQ ID NO: 12049, and a CDR3-H consisting of SEQ ID NO: 12059;
(d) a CDR1-L consisting of SEQ ID NO: 12005, a CDR2-L consisting of SEQ ID NO: 12015, a CDR3-L consisting of SEQ ID NO: 12025, a CDR1-H consisting of SEQ ID NO: 12040, a CDR2-H consisting of SEQ ID NO: 12050, and a CDR3-H consisting of SEQ ID NO: 12060;
(e) a CDR1-L consisting of SEQ ID NO: 12006, a CDR2-L consisting of SEQ ID NO: 12016, a CDR3-L consisting of SEQ ID NO: 12026, a CDR1-H consisting of SEQ ID NO: 12041, a CDR2-H consisting of SEQ ID NO: 12051, and a CDR3-H consisting of SEQ ID NO: 12061;
(f) a CDR1-L consisting of SEQ ID NO: 12007, a CDR2-L consisting of SEQ ID NO: 12017, a CDR3-L consisting of SEQ ID NO: 12027, a CDR1-H consisting of SEQ ID NO: 12042, a CDR2-H consisting of SEQ ID NO: 12052, and a CDR3-H consisting of SEQ ID NO: 12062; or
(g) a CDR1-L consisting of SEQ ID NO: 12008, a CDR2-L consisting of SEQ ID NO: 12018, a CDR3-L consisting of SEQ ID NO: 12028, a CDR1-H consisting of SEQ ID NO: 12043, a CDR2-H consisting of SEQ ID NO: 12053, and a CDR3-H consisting of SEQ ID NO: 12063.

128. The ABP of claim 127, wherein the ABP comprises
a variable light chain (V_{L}) comprising a sequence at least 97% identical to SEQ ID NO:14 and a variable heavy chain (V_{H}) comprising a sequence at least 97% identical to SEQ ID NO:114.

129. The ABP of claim 126, wherein the ABP comprises:
(a) a CDR1-L consisting of any one of SEQ ID NOs:, a CDR2-L consisting of any one of SEQ ID NOs: 1001-1028, a CDR3-L consisting of any one of SEQ ID NOs: 2001-2028, a CDR1-H consisting of any one of SEQ ID NOs:, a CDR2-H consisting of consisting of any one of SEQ ID NOs: 3001-3028.

130. The ABP of claim 127, wherein the ABP comprises
a variable light chain (V_{L}) comprising a sequence at least 97% identical to any one of SEQ ID NOs:1-28 and a variable heavy chain (V_{H}) comprising a sequence at least 97% identical to SEQ ID NO:1-128.

131. The ABP of claim 126, wherein the ABP comprises a lysine at amino acid position 97 (R97) according to IMGT exon numbering.

132. The ABP of claim 126, wherein the ABP comprises a lysine at amino acid position 97 (R214) according to EU numbering.

133. The ABP of any one of claims 126-132, comprising an afucosylated Fc region.

134. The ABP of any one of claims 126-133, produced from a cell comprising a bacterial protein RMD (GDP-6-deoxy-D-lyxo-4-hexulose reductase) or a modification thereof.

135. The ABP of claim 134, wherein the cell is cultured in the absence of fucose.

136. The ABP of any one of claims 126-135, produced from a cell lacking or reduced expression of Fut8.

137. The ABP of any one of claims 126-136, produced from a cell cultured in the presence of a fucosylation inhibitor, 2-Fluorfucose (2FF).

138. The ABP of any one of claims 126-137, produced from a cell overexpressing glycosyltransferase (GnTIII).

139. The ABP of any one of claims 126-138, having been isolated based on its fucosylation status.

140. The ABP of any one of claims 126-139, comprising an Fc region lacking core fucosylation of the N-glycan of the Fc portion.

141. The ABP of any one of claims 126-140, wherein the ABP is an afucosylated monoclonal antibody.

142. The ABP of any one of claims 131-141, wherein the ABP is selected from an anti-CTLA-4 antibody or antigen-binding fragment thereof, anti-PD-L1 antibody or antigen-binding fragment thereof, an anti-PD1 antibody or antigen-binding fragment thereof, a TIGIT antibody or antigen-binding fragment thereof, a LAG-3 antibody or antigen-binding fragment thereof, a CD47 antibody or antigen-binding fragment thereof, a BRAF antibody or antigen-binding fragment thereof, a MEK antibody or antigen-binding fragment thereof, and a PI3K antibody or antigen-binding fragment thereof.

143. The ABP any one of claims 131-141, wherein the ABP comprises:
(a) a CDR1-L consisting of SEQ ID NO:12078, a CDR2-L consisting of SEQ ID NO:12079, a CDR3-L consisting of SEQ ID NO:12080, a CDR1-H consisting of SEQ ID NO:12075, a CDR2-H consisting of SEQ ID NO:12076 and a CDR3-H consisting of SEQ ID NO:12077;
(b) a CDR1-L consisting of SEQ ID NO: 1014, a CDR2-L consisting of SEQ ID NO: 2014, a CDR3-L consisting of SEQ ID NO: 3014, a CDR1-H consisting of SEQ ID NO: 4014, a CDR2-H consisting of SEQ ID NO: 5014 and a CDR3-H consisting of SEQ ID NO: 6014;
(c) a CDR1-L consisting of SEQ ID NO: 12004, a CDR2-L consisting of SEQ ID NO: 12014, a CDR3-L consisting of SEQ ID NO: 12024, a CDR1-H consisting of SEQ ID NO: 12039, a CDR2-H consisting of SEQ ID NO: 12049, and a CDR3-H consisting of SEQ ID NO: 12059;
(d) a CDR1-L consisting of SEQ ID NO: 12005, a CDR2-L consisting of SEQ ID NO: 12015, a CDR3-L consisting of SEQ ID NO: 12025, a CDR1-H consisting of SEQ ID NO: 12040, a CDR2-H consisting of SEQ ID NO: 12050, and a CDR3-H consisting of SEQ ID NO: 12060;
(e) a CDR1-L consisting of SEQ ID NO: 12006, a CDR2-L consisting of SEQ ID NO: 12016, a CDR3-L consisting of SEQ ID NO: 12026, a CDR1-H consisting of SEQ ID NO: 12041, a CDR2-H consisting of SEQ ID NO: 12051, and a CDR3-H consisting of SEQ ID NO: 12061;
(f) a CDR1-L consisting of SEQ ID NO: 12007, a CDR2-L consisting of SEQ ID NO: 12017, a CDR3-L consisting of SEQ ID NO: 12027, a CDR1-H consisting of SEQ ID NO: 12042, a CDR2-H consisting of SEQ ID NO: 12052, and a CDR3-H consisting of SEQ ID NO: 12062; or
(g) a CDR1-L consisting of SEQ ID NO: 12008, a CDR2-L consisting of SEQ ID NO: 12018, a CDR3-L consisting of SEQ ID NO: 12028, a CDR1-H consisting of SEQ ID NO: 12043, a CDR2-H consisting of SEQ ID NO: 12053, and a CDR3-H consisting of SEQ ID NO: 12063.

144. The ABP of any one of claims 131-141, wherein the ABP comprises
a variable light chain (V_{L}) comprising a sequence at least 97% identical to SEQ ID NO:14 and a variable heavy chain (V_{H}) comprising a sequence at least 97% identical to SEQ ID NO:114.

145. The ABP of any one of claims 131-141, wherein the ABP comprises:
(a) a CDR1-L consisting of any one of SEQ ID NO: 12081: a CDR2-L consisting of SEQ ID NO: 12082, a CDR3-L consisting of SEQ ID NO: 12083, a CDR1-H consisting of SEQ ID NO: 12084, a CDR2-H consisting of consisting of SEQ ID NO: 12085, and a CDR3-H consisting of SEQ ID NO: 12086.

146. The ABP of any one of claims 131-141, wherein the ABP comprises
a variable light chain (V_{L}) comprising a sequence at least 97% identical to SEQ ID NO: 12088 and a variable heavy chain (V_{H}) comprising a sequence at least 97% identical to SEQ ID NO: 12087.

147. A pharmaceutical composition comprising the ABP of any one of claims 126-146 and a pharmaceutically acceptable excipient.

148. The pharmaceutical composition of claim 147, wherein less than 50% of the ABP is fucosylated.

149. The pharmaceutical composition of claim 148, wherein less than 40% of the ABP is fucosylated.

150. The pharmaceutical composition of claim 149, wherein less than 30% of the ABP is fucosylated.

151. The pharmaceutical composition of claim 150, wherein less than 20% of the ABP is fucosylated.

152. The pharmaceutical composition of claim 151, wherein less than 10% of the ABP is fucosylated.

153. The pharmaceutical composition of claim 147, wherein more than 30% of the ABP is fucosylated.

154. The pharmaceutical composition of claim 153, wherein more than 40% of the ABP is fucosylated.

155. The pharmaceutical composition of claim 154, wherein more than 50% of the ABP is fucosylated.

156. The pharmaceutical composition of claim 155, wherein more than 60% of the ABP is fucosylated.

157. The pharmaceutical composition of claim 156, wherein more than 70% of the ABP is fucosylated.

158. The pharmaceutical composition of claim 157, wherein more than 80% of the ABP is fucosylated.

159. The pharmaceutical composition of claim 158, wherein more than 90% of the ABP is fucosylated.

160. The pharmaceutical composition of any one of claims 147-159, having a pH from 5.0 to 6.5.

161. The pharmaceutical composition of any one of claims 147-160, comprising 20 mM of histidine or citrate buffer.

162. The pharmaceutical composition of any one of claims 147-161, comprising 50 mM of NaCl.

163. The pharmaceutical composition of any one of claims 162-162, comprising sucrose at a concentration from 170 mM to 270 mM.

164. The pharmaceutical composition of claim 163, comprising 170 mM or 270 mM of sucrose.

165. The pharmaceutical composition of any one of claims 147-164, comprising 20 mg/mL of the ABP.

166. A method of treating a disease comprising the step of
administering to a subject in need thereof an effective amount of the ABP of any of claims 125-145 or the pharmaceutical composition of any one of claims 147-165.

167. The method of claim 166, wherein the disease is selected from the group consisting of cancer, AIDS, Alzheimer's disease and viral or bacterial infection.

168. The method of claim 166 or claim 167, further comprising the step of administering one or more additional therapeutic agents to the subject.

169. The method of claim 168, wherein the additional therapeutic agent is selected from an anti-PD-L1, an anti-PD1, a TIGIT inhibitor, a LAG-3 inhibitor, a CD47 inhibitor, a BRAF inhibitor, a MEK inhibitor, a PI3K inhibitor, a chemotherapy agent, an immune-stimulatory agent, radiation, a cytokine, a polynucleotide encoding a cytokine, an oncolytic virus encoding a cytokine, and a combination thereof.

170. An isolated polynucleotide encoding the ABP of any of claims 126-146.

171. A vector comprising the isolated polynucleotide of claim 170.

172. A host cell comprising the isolated polynucleotide of claim 170 or the vector of claim 170.

173. The host cell of claim 172, wherein the host cell further comprises a bacterial protein RMD (GDP-6-deoxy-D-lyxo-4-hexulose reductase).

174. The host cell of any one of claims 172-173, wherein the host cell is cultured in the absence of fucose.

175. The host cell of any one of claims 172-174, lacking or having reduced expression of Fut8.

176. The host cell of any one of claims 172-175, cultured in the presence of a fucosylation inhibitor 2-Fluorfucose (2FF).

177. The host cell of any one of claims 172-176, overexpressing glycosyltransferase (GnTIII).

178. A method of producing an isolated antigen binding protein (ABP) that specifically binds human CTLA-4, comprising inducing expression of the ABP in the host cell of any one of claims 171-177, and isolating the ABP.

179. The method of claim 178, further comprising the step of isolating the ABP based on its fucosylation status.

180. The method of any one of claims 178-179, wherein the host cell is cultured in a cultured medium comprising a fucosylation inhibitor.

181. The method of claim 180, wherein the fucosylation inhibitor is 2-Fluorfucose (2FF).

182. A method of reducing CTLA-4^{HI} Tregs in a subject with limited proliferation of remaining Tregs comprising administering an effective dose of
the ABP of any one of claims 126-146 or the pharmaceutical composition of any one of claims 141-164.

183. The method of claim 182, wherein the subject is a human subject, optionally, a human subject with melanoma, RCC (renal cell cancer), NSCLC (non-small cell lung cancer), Merkel cell carcinoma, cSCC, mesothelioma, MSI colorectal cancer, ovarian cancer, or cervical cancer.

184. The method of claim 182 or claim 183, further comprising the step of administering one or more additional therapeutic agents to the subject.

185. The method of claim 184, wherein the additional therapeutic agent is an anti-PD-L1 or an anti-PD1 or a combination thereof.

186. The method of claim 182, wherein the subject has a tumor with high levels of Tregs, high levels of CTLA-4, high levels of NK cells, or high levels of activating FcRs.

187. A method of reducing CTLA-4^{HI} Tregs in a subject with limited proliferation of remaining Tregs comprising administering an effective dose of
the ABP of any one of claims 126-146 or the pharmaceutical composition of any one of claims 146-164.

188. The method of claim 187, wherein the subject is a human subject, optionally, a human subject with melanoma, RCC (renal cell cancer), NSCLC (non-small cell lung cancer), Merkel cell carcinoma, cSCC, mesothelioma, MSI colorectal cancer, ovarian cancer, or cervical cancer.

189. The method of claim 187 or claim 188, further comprising the step of administering one or more additional therapeutic agents to the subject.

190. The method of claim 187, wherein the subject has a tumor with high levels of Tregs, high levels of CTLA-4, high levels of NK cells, or high levels of activating FcRs.

191. A method of reducing CTLA-4^{HI} Tregs in a subject with limited proliferation of remaining Tregs comprising administering to the subject an effective dose of an antigen binding protein (ABP) that specifically binds a human cytotoxic T-lymphocyte associated protein 4 (CTLA-4).

192. The method of claim 191, wherein the subject is a human subject, optionally, a human subject with melanoma, RCC (renal cell cancer), NSCLC (non-small cell lung cancer), Merkel cell carcinoma, cSCC, mesothelioma, MSI colorectal cancer, ovarian cancer, or cervical cancer.

193. The method of claim 191 or claim 192, further comprising the step of administering one or more additional therapeutic agents to the subject.

194. The ABP of claim 191, wherein the ABP comprises
a variable light chain (VL) comprising a sequence at least 97% identical to SEQ ID NO:14 and a variable heavy chain (VH) comprising a sequence at least 97% identical to SEQ ID NO:114.

195. The ABP of claim 191, wherein the ABP comprises:
(a) a CDR1-L consisting of any one of SEQ ID NOs:, a CDR2-L consisting of any one of SEQ ID NOs: 1001-1028, a CDR3-L consisting of any one of SEQ ID NOs: 3001-3028, a CDR1-H consisting of any one of SEQ ID NOs:, a CDR2-H consisting of consisting of any one of SEQ ID NOs: 3001-3028.

196. The ABP of claim 191, wherein the ABP comprises
a variable light chain (VL) comprising a sequence at least 97% identical to any one of SEQ ID NOs:1-28 and a variable heavy chain (VH) comprising a sequence at least 97% identical to SEQ ID NO:101-128.

197. The ABP of claim 191, wherein the ABP comprises:
(a) a CDR1-L consisting of any one of SEQ ID NO: 12081:, a CDR2-L consisting of SEQ ID NO: 12082, a CDR3-L consisting of SEQ ID NO: 12083, a CDR1-H consisting of SEQ ID NO: 12084, a CDR2-H consisting of consisting of SEQ ID NO: 12085, and a CDR3-H consisting of SEQ ID NO: 12086.

198. The ABP of claim 191, wherein the ABP comprises
a variable light chain (V_{L}) comprising a sequence at least 97% identical to SEQ ID NO: 12088 and a variable heavy chain (V_{H}) comprising a sequence at least 97% identical to SEQ ID NO: 12087.
